United States Patent Application Publication US 2026/0275333 A1 - sequence listing, part 15

SEQ ID NO: 3045 - RNA, 64444167 nt, Homo sapiens (residues 30,073,947-32,222,085 of 64,444,167)
  source 1..64444167: mol_type = mRNA
nnnnnnnnnnnnnnnnnnnnnnnnnnnnnnnnnnnnnnnnnnnnnnnnnnnnnnnnnnnnnnnnnnnnnnnnnnnnnnnnnnnnnnnnnnnnnnnnnnnnnnnnnnnnnnnnnnnnnnnnnnnnnnnnnnnnnnnnnnnnnnnnnnnnnnnnnnnnnnnnnnnnnnnnnnnnnnnnnnnnnnnnnnnnnnnnnnnnnnnnnnnnnnnnnnnnnnnnnnnnnnnnnnnnnnnnnnnnnnnnnnnnnnnnnnnnnnnnnnnnnnnnnnnnnnnnnnnnnnnnnnnnnnnnnnnnnnnnnnnnnnnnnnnnnnnnnnnnnnnnnnnnnnnnnnnnnnnnnnnnnnnnnnnnnnnnnnnnnnnnnnnnnnnnnnnnnnnnnnnnnnnnnnnnnnnnnnnnnnnnnnnnnnnnnnnnnnnnnnnnnnnnnnnnnnnnnnnnnnnnnnnnnnnnnnnnnnnnnnnnnnnnnnnnnnnnnnnnnnnnnnnnnnnnnnnnnnnnnnnnnnnnnnnnnnnnnnnnnnnnnnnnnnnnnnnnnnnnnnnnnnnnnnnnnnnnnnnnnnnnnnnnnnnnnnnnnnnnnnnnnnnnnnnnnnnnnnnnnnnnnnnnnnnnnnnnnnnnnnnnnnnnnnnnnnnnnnnnnnnnnnnnnnnnnnnnnnnnnnnnnnnnnnnnnnnnnnnnnnnnnnnnnnnnnnnnnnnnnnnnnnnnnnnnnnnnnnnnnnnnnnnnnnnnnnnnnnnnnnnnnnnnnnnnnnnnnnnnnnnnnnnnnnnnnnnnnnnnnnnnnnnnnnnnnnnnnnnnnnnnnnnnnnnnnnnnnnnnnnnnnnnnnnnnnnnnnnnnnnnnnnnnnnnnnnnnnnnnnnnnnnnnnnnnnnnnnnnnnnnnnnnnnnnnnnnnnnnnnnnnnnnnnnnnnnnnnnnnnnnnnnnnnnnnnnnnnnnnnnnnnnnnnnnnnnnnnnnnnnnnnnnnnnnnnnnnnnnnnnnnnnnnnnnnnnnnnnnnnnnnnnnnnnnnnnnnnnnnnnnnnnnnnnnnnnnnnnnnnnnnnnnnnnnnnnnnnnnnnnnnnnnnnnnnnnnnnnnnnnnnnnnnnnnnnnnnnnnnnnnnnnnnnnnnnnnnnnnnnnnnnnnnnnnnnnnnnnnnnnnnnnnnnnnnnnnnnnnnnnnnnnnnnnnnnnnnnnnnnnnnnnnnnnnnnnnnnnnnnnnnnnnnnnnnnnnnnnnnnnnnnnnnnnnnnnnnnnnnnnnnnnnnnnnnnnnnnnnnnnnnnnnnnnnnnnnnnnnnnnnnnnnnnnnnnnnnnnnnnnnnnnnnnnnnnnnnnnnnnnnnnnnnnnnnnnnnnnnnnnnnnnnnnnnnnnnnnnnnnnnnnnnnnnnnnnnnnnnnnnnnnnnnnnnnnnnnnnnnnnnnnnnnnnnnnnnnnnnnnnnnnnnnnnnnnnnnnnnnnnnnnnnnnnnnnnnnnnnnnnnnnnnnnnnnnnnnnnnnnnnnnnnnnnnnnnnnnnnnnnnnnnnnnnnnnnnnnnnnnnnnnnnnnnnnnnnnnnnnnnnnnnnnnnnnnnnnnnnnnnnnnnnnnnnnnnnnnnnnnnnnnnnnnnnnnnnnnnnnnnnnnnnnnnnnnnnnnnnnnnnnnnnnnnnnnnnnnnnnnnnnnnnnnnnnnnnnnnnnnnnnnnnnnnnnnnnnnnnnnnnnnnnnnnnnnnnnnnnnnnnnnnnnnnnnnnnnnnnnnnnnnnnnnnnnnnnnnnnnnnnnnnnnnnnnnnnnnnnnnnnnnnnnnnnnnnnnnnnnnnnnnnnnnnnnnnnnnnnnnnnnnnnnnnnnnnnnnnnnnnnnnnnnnnnnnnnnnnnnnnnnnnnnnnnnnnnnnnnnnnnnnnnnnnnnnnnnnnnnnnnnnnnnnnnnnnnnnnnnnnnnnnnnnnnnnnnnnnnnnnnnnnnnnnnnnnnnnnnnnnnnnnnnnnnnnnnnnnnnnnnnnnnnnnnnnnnnnnnnnnnnnnnnnnnnnnnnnnnnnnnnnnnnnnnnnnnnnnnnnnnnnnnnnnnnnnnnnnnnnnnnnnnnnnnnnnnnnnnnnnnnnnnnnnnnnnnnnnnnnnnnnnnnnnnnnnnnnnnnnnnnnnnnnnnnnnnnnnnnnnnnnnnnnnnnnnnnnnnnnnnnnnnnnnnnnnnnnnnnnnnnnnnnnnnnnnnnnnnnnnnnnnnnnnnnnnnnnnnnnnnnnnnnnnnnnnnnnnnnnnnnnnnnnnnnnnnnnnnnnnnnnnnnnnnnnnnnnnnnnnnnnnnnnnnnnnnnnnnnnnnnnnnnnnnnnnnnnnnnnnnnnnnnnnnnnnnnnnnnnnnnnnnnnnnnnnnnnnnnnnnnnnnnnnnnnnnnnnnnnnnnnnnnnnnnnnnnnnnnnnnnnnnnnnnnnnnnnnnnnnnnnnnnnnnnnnnnnnnnnnnnnnnnnnnnnnnnnnnnnnnnnnnnnnnnnnnnnnnnnnnnnnnnnnnnnnnnnnnnnnnnnnnnnnnnnnnnnnnnnnnnnnnnnnnnnnnnnnnnnnnnnnnnnnnnnnnnnnnnnnnnnnnnnnnnnnnnnnnnnnnnnnnnnnnnnnnnnnnnnnnnnnnnnnnnnnnnnnnnnnnnnnnnnnnnnnnnnnnnnnnnnnnnnnnnnnnnnnnnnnnnnnnnnnnnnnnnnnnnnnnnnnnnnnnnnnnnnnnnnnnnnnnnnnnnnnnnnnnnnnnnnnnnnnnnnnnnnnnnnnnnnnnnnnnnnnnnnnnnnnnnnnnnnnnnnnnnnnnnnnnnnnnnnnnnnnnnnnnnnnnnnnnnnnnnnnnnnnnnnnnnnnnnnnnnnnnnnnnnnnnnnnnnnnnnnnnnnnnnnnnnnnnnnnnnnnnnnnnnnnnnnnnnnnnnnnnnnnnnnnnnnnnnnnnnnnnnnnnnnnnnnnnnnnnnnnnnnnnnnnnnnnnnnnnnnnnnnnnnnnnnnnnnnnnnnnnnnnnnnnnnnnnnnnnnnnnnnnnnnnnnnnnnnnnnnnnnnnnnnnnnnnnnnnnnnnnnnnnnnnnnnnnnnnnnnnnnnnnnnnnnnnnnnnnnnnnnnnnnnnnnnnnnnnnnnnnnnnnnnnnnnnnnnnnnnnnnnnnnnnnnnnnnnnnnnnnnnnnnnnnnnnnnnnnnnnnnnnnnnnnnnnnnnnnnnnnnnnnnnnnnnnnnnnnnnnnnnnnnnnnnnnnnnnnnnnnnnnnnnnnnnnnnnnnnnnnnnnnnnnnnnnnnnnnnnnnnnnnnnnnnnnnnnnnnnnnnnnnnnnnnnnnnnnnnnnnnnnnnnnnnnnnnnnnnnnnnnnnnnnnnnnnnnnnnnnnnnnnnnnnnnnnnnnnnnnnnnnnnnnnnnnnnnnnnnnnnnnnnnnnnnnnnnnnnnnnnnnnnnnnnnnnnnnnnnnnnnnnnnnnnnnnnnnnnnnnnnnnnnnnnnnnnnnnnnnnnnnnnnnnnnnnnnnnnnnnnnnnnnnnnnnnnnnnnnnnnnnnnnnnnnnnnnnnnnnnnnnnnnnnnnnnnnnnnnnnnnnnnnnnnnnnnnnnnnnnnnnnnnnnnnnnnnnnnnnnnnnnnnnnnnnnnnnnnnnnnnnnnnnnnnnnnnnnnnnnnnnnnnnnnnnnnnnnnnnnnnnnnnnnnnnnnnnnnnnnnnnnnnnnnnnnnnnnnnnnnnnnnnnnnnnnnnnnnnnnnnnnnnnnnnnnnnnnnnnnnnnnnnnnnnnnnnnnnnnnnnnnnnnnnnnnnnnnnnnnnnnnnnnnnnnnnnnnnnnnnnnnnnnnnnnnnnnnnnnnnnnnnnnnnnnnnnnnnnnnnnnnnnnnnnnnnnnnnnnnnnnnnnnnnnnnnnnnnnnnnnnnnnnnnnnnnnnnnnnnnnnnnnnnnnnnnnnnnnnnnnnnnnnnnnnnnnnnnnnnnnnnnnnnnnnnnnnnnnnnnnnnnnnnnnnnnnnnnnnnnnnnnnnnnnnnnnnnnnnnnnnnnnnnnnnnnnnnnnnnnnnnnnnnnnnnnnnnnnnnnnnnnnnnnnnnnnnnnnnnnnnnnnnnnnnnnnnnnnnnnnnnnnnnnnnnnnnnnnnnnnnnnnnnnnnnnnnnnnnnnnnnnnnnnnnnnnnnnnnnnnnnnnnnnnnnnnnnnnnnnnnnnnnnnnnnnnnnnnnnnnnnnnnnnnnnnnnnnnnnnnnnnnnnnnnnnnnnnnnnnnnnnnnnnnnnnnnnnnnnnnnnnnnnnnnnnnnnnnnnnnnnnnnnnnnnnnnnnnnnnnnnnnnnnnnnnnnnnnnnnnnnnnnnnnnnnnnnnnnnnnnnnnnnnnnnnnnnnnnnnnnnnnnnnnnnnnnnnnnnnnnnnnnnnnnnnnnnnnnnnnnnnnnnnnnnnnnnnnnnnnnnnnnnnnnnnnnnnnnnnnnnnnnnnnnnnnnnnnnnnnnnnnnnnnnnnnnnnnnnnnnnnnnnnnnnnnnnnnnnnnnnnnnnnnnnnnnnnnnnnnnnnnnnnnnnnnnnnnnnnnnnnnnnnnnnnnnnnnnnnnnnnnnnnnnnnnnnnnnnnnnnnnnnnnnnnnnnnnnnnnnnnnnnnnnnnnnnnnnnnnnnnnnnnnnnnnnnnnnnnnnnnnnnnnnnnnnnnnnnnnnnnnnnnnnnnnnnnnnnnnnnnnnnnnnnnnnnnnnnnnnnnnnnnnnnnnnnnnnnnnnnnnnnnnnnnnnnnnnnnnnnnnnnnnnnnnnnnnnnnnnnnnnnnnnnnnnnnnnnnnnnnnnnnnnnnnnnnnnnnnnnnnnnnnnnnnnnnnnnnnnnnnnnnnnnnnnnnnnnnnnnnnnnnnnnnnnnnnnnnnnnnnnnnnnnnnnnnnnnnnnnnnnnnnnnnnnnnnnnnnnnnnnnnnnnnnnnnnnnnnnnnnnnnnnnnnnnnnnnnnnnnnnnnnnnnnnnnnnnnnnnnnnnnnnnnnnnnnnnnnnnnnnnnnnnnnnnnnnnnnnnnnnnnnnnnnnnnnnnnnnnnnnnnnnnnnnnnnnnnnnnnnnnnnnnnnnnnnnnnnnnnnnnnnnnnnnnnnnnnnnnnnnnnnnnnnnnnnnnnnnnnnnnnnnnnnnnnnnnnnnnnnnnnnnnnnnnnnnnnnnnnnnnnnnnnnnnnnnnnnnnnnnnnnnnnnnnnnnnnnnnnnnnnnnnnnnnnnnnnnnnnnnnnnnnnnnnnnnnnnnnnnnnnnnnnnnnnnnnnnnnnnnnnnnnnnnnnnnnnnnnnnnnnnnnnnnnnnnnnnnnnnnnnnnnnnnnnnnnnnnnnnnnnnnnnnnnnnnnnnnnnnnnnnnnnnnnnnnnnnnnnnnnnnnnnnnnnnnnnnnnnnnnnnnnnnnnnnnnnnnnnnnnnnnnnnnnnnnnnnnnnnnnnnnnnnnnnnnnnnnnnnnnnnnnnnnnnnnnnnnnnnnnnnnnnnnnnnnnnnnnnnnnnnnnnnnnnnnnnnnnnnnnnnnnnnnnnnnnnnnnnnnnnnnnnnnnnnnnnnnnnnnnnnnnnnnnnnnnnnnnnnnnnnnnnnnnnnnnnnnnnnnnnnnnnnnnnnnnnnnnnnnnnnnnnnnnnnnnnnnnnnnnnnnnnnnnnnnnnnnnnnnnnnnnnnnnnnnnnnnnnnnnnnnnnnnnnnnnnnnnnnnnnnnnnnnnnnnnnnnnnnnnnnnnnnnnnnnnnnnnnnnnnnnnnnnnnnnnnnnnnnnnnnnnnnnnnnnnnnnnnnnnnnnnnnnnnnnnnnnnnnnnnnnnnnnnnnnnnnnnnnnnnnnnnnnnnnnnnnnnnnnnnnnnnnnnnnnnnnnnnnnnnnnnnnnnnnnnnnnnnnnnnnnnnnnnnnnnnnnnnnnnnnnnnnnnnnnnnnnnnnnnnnnnnnnnnnnnnnnnnnnnnnnnnnnnnnnnnnnnnnnnnnnnnnnnnnnnnnnnnnnnnnnnnnnnnnnnnnnnnnnnnnnnnnnnnnnnnnnnnnnnnnnnnnnnnnnnnnnnnnnnnnnnnnnnnnnnnnnnnnnnnnnnnnnnnnnnnnnnnnnnnnnnnnnnnnnnnnnnnnnnnnnnnnnnnnnnnnnnnnnnnnnnnnnnnnnnnnnnnnnnnnnnnnnnnnnnnnnnnnnnnnnnnnnnnnnnnnnnnnnnnnnnnnnnnnnnnnnnnnnnnnnnnnnnnnnnnnnnnnnnnnnnnnnnnnnnnnnnnnnnnnnnnnnnnnnnnnnnnnnnnnnnnnnnnnnnnnnnnnnnnnnnnnnnnnnnnnnnnnnnnnnnnnnnnnnnnnnnnnnnnnnnnnnnnnnnnnnnnnnnnnnnnnnnnnnnnnnnnnnnnnnnnnnnnnnnnnnnnnnnnnnnnnnnnnnnnnnnnnnnnnnnnnnnnnnnnnnnnnnnnnnnnnnnnnnnnnnnnnnnnnnnnnnnnnnnnnnnnnnnnnnnnnnnnnnnnnnnnnnnnnnnnnnnnnnnnnnnnnnnnnnnnnnnnnnnnnnnnnnnnnnnnnnnnnnnnnnnnnnnnnnnnnnnnnnnnnnnnnnnnnnnnnnnnnnnnnnnnnnnnnnnnnnnnnnnnnnnnnnnnnnnnnnnnnnnnnnnnnnnnnnnnnnnnnnnnnnnnnnnnnnnnnnnnnnnnnnnnnnnnnnnnnnnnnnnnnnnnnnnnnnnnnnnnnnnnnnnnnnnnnnnnnnnnnnnnnnnnnnnnnnnnnnnnnnnnnnnnnnnnnnnnnnnnnnnnnnnnnnnnnnnnnnnnnnnnnnnnnnnnnnnnnnnnnnnnnnnnnnnnnnnnnnnnnnnnnnnnnnnnnnnnnnnnnnnnnnnnnnnnnnnnnnnnnnnnnnnnnnnnnnnnnnnnnnnnnnnnnnnnnnnnnnnnnnnnnnnnnnnnnnnnnnnnnnnnnnnnnnnnnnnnnnnnnnnnnnnnnnnnnnnnnnnnnnnnnnnnnnnnnnnnnnnnnnnnnnnnnnnnnnnnnnnnnnnnnnnnnnnnnnnnnnnnnnnnnnnnnnnnnnnnnnnnnnnnnnnnnnnnnnnnnnnnnnnnnnnnnnnnnnnnnnnnnnnnnnnnnnnnnnnnnnnnnnnnnnnnnnnnnnnnnnnnnnnnnnnnnnnnnnnnnnnnnnnnnnnnnnnnnnnnnnnnnnnnnnnnnnnnnnnnnnnnnnnnnnnnnnnnnnnnnnnnnnnnnnnnnnnnnnnnnnnnnnnnnnnnnnnnnnnnnnnnnnnnnnnnnnnnnnnnnnnnnnnnnnnnnnnnnnnnnnnnnnnnnnnnnnnnnnnnnnnnnnnnnnnnnnnnnnnnnnnnnnnnnnnnnnnnnnnnnnnnnnnnnnnnnnnnnnnnnnnnnnnnnnnnnnnnnnnnnnnnnnnnnnnnnnnnnnnnnnnnnnnnnnnnnnnnnnnnnnnnnnnnnnnnnnnnnnnnnnnnnnnnnnnnnnnnnnnnnnnnnnnnnnnnnnnnnnnnnnnnnnnnnnnnnnnnnnnnnnnnnnnnnnnnnnnnnnnnnnnnnnnnnnnnnnnnnnnnnnnnnnnnnnnnnnnnnnnnnnnnnnnnnnnnnnnnnnnnnnnnnnnnnnnnnnnnnnnnnnnnnnnnnnnnnnnnnnnnnnnnnnnnnnnnnnnnnnnnnnnnnnnnnnnnnnnnnnnnnnnnnnnnnnnnnnnnnnnnnnnnnnnnnnnnnnnnnnnnnnnnnnnnnnnnnnnnnnnnnnnnnnnnnnnnnnnnnnnnnnnnnnnnnnnnnnnnnnnnnnnnnnnnnnnnnnnnnnnnnnnnnnnnnnnnnnnnnnnnnnnnnnnnnnnnnnnnnnnnnnnnnnnnnnnnnnnnnnnnnnnnnnnnnnnnnnnnnnnnnnnnnnnnnnnnnnnnnnnnnnnnnnnnnnnnnnnnnnnnnnnnnnnnnnnnnnnnnnnnnnnnnnnnnnnnnnnnnnnnnnnnnnnnnnnnnnnnnnnnnnnnnnnnnnnnnnnnnnnnnnnnnnnnnnnnnnnnnnnnnnnnnnnnnnnnnnnnnnnnnnnnnnnnnnnnnnnnnnnnnnnnnnnnnnnnnnnnnnnnnnnnnnnnnnnnnnnnnnnnnnnnnnnnnnnnnnnnnnnnnnnnnnnnnnnnnnnnnnnnnnnnnnnnnnnnnnnnnnnnnnnnnnnnnnnnnnnnnnnnnnnnnnnnnnnnnnnnnnnnnnnnnnnnnnnnnnnnnnnnnnnnnnnnnnnnnnnnnnnnnnnnnnnnnnnnnnnnnnnnnnnnnnnnnnnnnnnnnnnnnnnnnnnnnnnnnnnnnnnnnnnnnnnnnnnnnnnnnnnnnnnnnnnnnnnnnnnnnnnnnnnnnnnnnnnnnnnnnnnnnnnnnnnnnnnnnnnnnnnnnnnnnnnnnnnnnnnnnnnnnnnnnnnnnnnnnnnnnnnnnnnnnnnnnnnnnnnnnnnnnnnnnnnnnnnnnnnnnnnnnnnnnnnnnnnnnnnnnnnnnnnnnnnnnnnnnnnnnnnnnnnnnnnnnnnnnnnnnnnnnnnnnnnnnnnnnnnnnnnnnnnnnnnnnnnnnnnnnnnnnnnnnnnnnnnnnnnnnnnnnnnnnnnnnnnnnnnnnnnnnnnnnnnnnnnnnnnnnnnnnnnnnnnnnnnnnnnnnnnnnnnnnnnnnnnnnnnnnnnnnnnnnnnnnnnnnnnnnnnnnnnnnnnnnnnnnnnnnnnnnnnnnnnnnnnnnnnnnnnnnnnnnnnnnnnnnnnnnnnnnnnnnnnnnnnnnnnnnnnnnnnnnnnnnnnnnnnnnnnnnnnnnnnnnnnnnnnnnnnnnnnnnnnnnnnnnnnnnnnnnnnnnnnnnnnnnnnnnnnnnnnnnnnnnnnnnnnnnnnnnnnnnnnnnnnnnnnnnnnnnnnnnnnnnnnnnnnnnnnnnnnnnnnnnnnnnnnnnnnnnnnnnnnnnnnnnnnnnnnnnnnnnnnnnnnnnnnnnnnnnnnnnnnnnnnnnnnnnnnnnnnnnnnnnnnnnnnnnnnnnnnnnnnnnnnnnnnnnnnnnnnnnnnnnnnnnnnnnnnnnnnnnnnnnnnnnnnnnnnnnnnnnnnnnnnnnnnnnnnnnnnnnnnnnnnnnnnnnnnnnnnnnnnnnnnnnnnnnnnnnnnnnnnnnnnnnnnnnnnnnnnnnnnnnnnnnnnnnnnnnnnnnnnnnnnnnnnnnnnnnnnnnnnnnnnnnnnnnnnnnnnnnnnnnnnnnnnnnnnnnnnnnnnnnnnnnnnnnnnnnnnnnnnnnnnnnnnnnnnnnnnnnnnnnnnnnnnnnnnnnnnnnnnnnnnnnnnnnnnnnnnnnnnnnnnnnnnnnnnnnnnnnnnnnnnnnnnnnnnnnnnnnnnnnnnnnnnnnnnnnnnnnnnnnnnnnnnnnnnnnnnnnnnnnnnnnnnnnnnnnnnnnnnnnnnnnnnnnnnnnnnnnnnnnnnnnnnnnnnnnnnnnnnnnnnnnnnnnnnnnnnnnnnnnnnnnnnnnnnnnnnnnnnnnnnnnnnnnnnnnnnnnnnnnnnnnnnnnnnnnnnnnnnnnnnnnnnnnnnnnnnnnnnnnnnnnnnnnnnnnnnnnnnnnnnnnnnnnnnnnnnnnnnnnnnnnnnnnnnnnnnnnnnnnnnnnnnnnnnnnnnnnnnnnnnnnnnnnnnnnnnnnnnnnnnnnnnnnnnnnnnnnnnnnnnnnnnnnnnnnnnnnnnnnnnnnnnnnnnnnnnnnnnnnnnnnnnnnnnnnnnnnnnnnnnnnnnnnnnnnnnnnnnnnnnnnnnnnnnnnnnnnnnnnnnnnnnnnnnnnnnnnnnnnnnnnnnnnnnnnnnnnnnnnnnnnnnnnnnnnnnnnnnnnnnnnnnnnnnnnnnnnnnnnnnnnnnnnnnnnnnnnnnnnnnnnnnnnnnnnnnnnnnnnnnnnnnnnnnnnnnnnnnnnnnnnnnnnnnnnnnnnnnnnnnnnnnnnnnnnnnnnnnnnnnnnnnnnnnnnnnnnnnnnnnnnnnnnnnnnnnnnnnnnnnnnnnnnnnnnnnnnnnnnnnnnnnnnnnnnnnnnnnnnnnnnnnnnnnnnnnnnnnnnnnnnnnnnnnnnnnnnnnnnnnnnnnnnnnnnnnnnnnnnnnnnnnnnnnnnnnnnnnnnnnnnnnnnnnnnnnnnnnnnnnnnnnnnnnnnnnnnnnnnnnnnnnnnnnnnnnnnnnnnnnnnnnnnnnnnnnnnnnnnnnnnnnnnnnnnnnnnnnnnnnnnnnnnnnnnnnnnnnnnnnnnnnnnnnnnnnnnnnnnnnnnnnnnnnnnnnnnnnnnnnnnnnnnnnnnnnnnnnnnnnnnnnnnnnnnnnnnnnnnnnnnnnnnnnnnnnnnnnnnnnnnnnnnnnnnnnnnnnnnnnnnnnnnnnnnnnnnnnnnnnnnnnnnnnnnnnnnnnnnnnnnnnnnnnnnnnnnnnnnnnnnnnnnnnnnnnnnnnnnnnnnnnnnnnnnnnnnnnnnnnnnnnnnnnnnnnnnnnnnnnnnnnnnnnnnnnnnnnnnnnnnnnnnnnnnnnnnnnnnnnnnnnnnnnnnnnnnnnnnnnnnnnnnnnnnnnnnnnnnnnnnnnnnnnnnnnnnnnnnnnnnnnnnnnnnnnnnnnnnnnnnnnnnnnnnnnnnnnnnnnnnnnnnnnnnnnnnnnnnnnnnnnnnnnnnnnnnnnnnnnnnnnnnnnnnnnnnnnnnnnnnnnnnnnnnnnnnnnnnnnnnnnnnnnnnnnnnnnnnnnnnnnnnnnnnnnnnnnnnnnnnnnnnnnnnnnnnnnnnnnnnnnnnnnnnnnnnnnnnnnnnnnnnnnnnnnnnnnnnnnnnnnnnnnnnnnnnnnnnnnnnnnnnnnnnnnnnnnnnnnnnnnnnnnnnnnnnnnnnnnnnnnnnnnnnnnnnnnnnnnnnnnnnnnnnnnnnnnnnnnnnnnnnnnnnnnnnnnnnnnnnnnnnnnnnnnnnnnnnnnnnnnnnnnnnnnnnnnnnnnnnnnnnnnnnnnnnnnnnnnnnnnnnnnnnnnnnnnnnnnnnnnnnnnnnnnnnnnnnnnnnnnnnnnnnnnnnnnnnnnnnnnnnnnnnnnnnnnnnnnnnnnnnnnnnnnnnnnnnnnnnnnnnnnnnnnnnnnnnnnnnnnnnnnnnnnnnnnnnnnnnnnnnnnnnnnnnnnnnnnnnnnnnnnnnnnnnnnnnnnnnnnnnnnnnnnnnnnnnnnnnnnnnnnnnnnnnnnnnnnnnnnnnnnnnnnnnnnnnnnnnnnnnnnnnnnnnnnnnnnnnnnnnnnnnnnnnnnnnnnnnnnnnnnnnnnnnnnnnnnnnnnnnnnnnnnnnnnnnnnnnnnnnnnnnnnnnnnnnnnnnnnnnnnnnnnnnnnnnnnnnnnnnnnnnnnnnnnnnnnnnnnnnnnnnnnnnnnnnnnnnnnnnnnnnnnnnnnnnnnnnnnnnnnnnnnnnnnnnnnnnnnnnnnnnnnnnnnnnnnnnnnnnnnnnnnnnnnnnnnnnnnnnnnnnnnnnnnnnnnnnnnnnnnnnnnnnnnnnnnnnnnnnnnnnnnnnnnnnnnnnnnnnnnnnnnnnnnnnnnnnnnnnnnnnnnnnnnnnnnnnnnnnnnnnnnnnnnnnnnnnnnnnnnnnnnnnnnnnnnnnnnnnnnnnnnnnnnnnnnnnnnnnnnnnnnnnnnnnnnnnnnnnnnnnnnnnnnnnnnnnnnnnnnnnnnnnnnnnnnnnnnnnnnnnnnnnnnnnnnnnnnnnnnnnnnnnnnnnnnnnnnnnnnnnnnnnnnnnnnnnnnnnnnnnnnnnnnnnnnnnnnnnnnnnnnnnnnnnnnnnnnnnnnnnnnnnnnnnnnnnnnnnnnnnnnnnnnnnnnnnnnnnnnnnnnnnnnnnnnnnnnnnnnnnnnnnnnnnnnnnnnnnnnnnnnnnnnnnnnnnnnnnnnnnnnnnnnnnnnnnnnnnnnnnnnnnnnnnnnnnnnnnnnnnnnnnnnnnnnnnnnnnnnnnnnnnnnnnnnnnnnnnnnnnnnnnnnnnnnnnnnnnnnnnnnnnnnnnnnnnnnnnnnnnnnnnnnnnnnnnnnnnnnnnnnnnnnnnnnnnnnnnnnnnnnnnnnnnnnnnnnnnnnnnnnnnnnnnnnnnnnnnnnnnnnnnnnnnnnnnnnnnnnnnnnnnnnnnnnnnnnnnnnnnnnnnnnnnnnnnnnnnnnnnnnnnnnnnnnnnnnnnnnnnnnnnnnnnnnnnnnnnnnnnnnnnnnnnnnnnnnnnnnnnnnnnnnnnnnnnnnnnnnnnnnnnnnnnnnnnnnnnnnnnnnnnnnnnnnnnnnnnnnnnnnnnnnnnnnnnnnnnnnnnnnnnnnnnnnnnnnnnnnnnnnnnnnnnnnnnnnnnnnnnnnnnnnnnnnnnnnnnnnnnnnnnnnnnnnnnnnnnnnnnnnnnnnnnnnnnnnnnnnnnnnnnnnnnnnnnnnnnnnnnnnnnnnnnnnnnnnnnnnnnnnnnnnnnnnnnnnnnnnnnnnnnnnnnnnnnnnnnnnnnnnnnnnnnnnnnnnnnnnnnnnnnnnnnnnnnnnnnnnnnnnnnnnnnnnnnnnnnnnnnnnnnnnnnnnnnnnnnnnnnnnnnnnnnnnnnnnnnnnnnnnnnnnnnnnnnnnnnnnnnnnnnnnnnnnnnnnnnnnnnnnnnnnnnnnnnnnnnnnnnnnnnnnnnnnnnnnnnnnnnnnnnnnnnnnnnnnnnnnnnnnnnnnnnnnnnnnnnnnnnnnnnnnnnnnnnnnnnnnnnnnnnnnnnnnnnnnnnnnnnnnnnnnnnnnnnnnnnnnnnnnnnnnnnnnnnnnnnnnnnnnnnnnnnnnnnnnnnnnnnnnnnnnnnnnnnnnnnnnnnnnnnnnnnnnnnnnnnnnnnnnnnnnnnnnnnnnnnnnnnnnnnnnnnnnnnnnnnnnnnnnnnnnnnnnnnnnnnnnnnnnnnnnnnnnnnnnnnnnnnnnnnnnnnnnnnnnnnnnnnnnnnnnnnnnnnnnnnnnnnnnnnnnnnnnnnnnnnnnnnnnnnnnnnnnnnnnnnnnnnnnnnnnnnnnnnnnnnnnnnnnnnnnnnnnnnnnnnnnnnnnnnnnnnnnnnnnnnnnnnnnnnnnnnnnnnnnnnnnnnnnnnnnnnnnnnnnnnnnnnnnnnnnnnnnnnnnnnnnnnnnnnnnnnnnnnnnnnnnnnnnnnnnnnnnnnnnnnnnnnnnnnnnnnnnnnnnnnnnnnnnnnnnnnnnnnnnnnnnnnnnnnnnnnnnnnnnnnnnnnnnnnnnnnnnnnnnnnnnnnnnnnnnnnnnnnnnnnnnnnnnnnnnnnnnnnnnnnnnnnnnnnnnnnnnnnnnnnnnnnnnnnnnnnnnnnnnnnnnnnnnnnnnnnnnnnnnnnnnnnnnnnnnnnnnnnnnnnnnnnnnnnnnnnnnnnnnnnnnnnnnnnnnnnnnnnnnnnnnnnnnnnnnnnnnnnnnnnnnnnnnnnnnnnnnnnnnnnnnnnnnnnnnnnnnnnnnnnnnnnnnnnnnnnnnnnnnnnnnnnnnnnnnnnnnnnnnnnnnnnnnnnnnnnnnnnnnnnnnnnnnnnnnnnnnnnnnnnnnnnnnnnnnnnnnnnnnnnnnnnnnnnnnnnnnnnnnnnnnnnnnnnnnnnnnnnnnnnnnnnnnnnnnnnnnnnnnnnnnnnnnnnnnnnnnnnnnnnnnnnnnnnnnnnnnnnnnnnnnnnnnnnnnnnnnnnnnnnnnnnnnnnnnnnnnnnnnnnnnnnnnnnnnnnnnnnnnnnnnnnnnnnnnnnnnnnnnnnnnnnnnnnnnnnnnnnnnnnnnnnnnnnnnnnnnnnnnnnnnnnnnnnnnnnnnnnnnnnnnnnnnnnnnnnnnnnnnnnnnnnnnnnnnnnnnnnnnnnnnnnnnnnnnnnnnnnnnnnnnnnnnnnnnnnnnnnnnnnnnnnnnnnnnnnnnnnnnnnnnnnnnnnnnnnnnnnnnnnnnnnnnnnnnnnnnnnnnnnnnnnnnnnnnnnnnnnnnnnnnnnnnnnnnnnnnnnnnnnnnnnnnnnnnnnnnnnnnnnnnnnnnnnnnnnnnnnnnnnnnnnnnnnnnnnnnnnnnnnnnnnnnnnnnnnnnnnnnnnnnnnnnnnnnnnnnnnnnnnnnnnnnnnnnnnnnnnnnnnnnnnnnnnnnnnnnnnnnnnnnnnnnnnnnnnnnnnnnnnnnnnnnnnnnnnnnnnnnnnnnnnnnnnnnnnnnnnnnnnnnnnnnnnnnnnnnnnnnnnnnnnnnnnnnnnnnnnnnnnnnnnnnnnnnnnnnnnnnnnnnnnnnnnnnnnnnnnnnnnnnnnnnnnnnnnnnnnnnnnnnnnnnnnnnnnnnnnnnnnnnnnnnnnnnnnnnnnnnnnnnnnnnnnnnnnnnnnnnnnnnnnnnnnnnnnnnnnnnnnnnnnnnnnnnnnnnnnnnnnnnnnnnnnnnnnnnnnnnnnnnnnnnnnnnnnnnnnnnnnnnnnnnnnnnnnnnnnnnnnnnnnnnnnnnnnnnnnnnnnnnnnnnnnnnnnnnnnnnnnnnnnnnnnnnnnnnnnnnnnnnnnnnnnnnnnnnnnnnnnnnnnnnnnnnnnnnnnnnnnnnnnnnnnnnnnnnnnnnnnngaattcaactcaaagagttgaacctttcttttgtagagcagatttgaaactctttttgtacaatctgtaagtagatatttggagcgctttgaggcttatggtggaaaaggaagtatcttcacataaaaactagagagaagcattctcagaaacttctttgtgataagtgcattcaactcacagagtcgaacctttctgttgatagagcagttttaaatcactctttttctagaatctgaaagtggatatttggagtgctctgaggcctatggtggaaaaggaaatacctacacataaaaactaggcggaagcattctcagaaatatctttgtgatgagtgcattcaactcacagagttgaacatttatgttgatagaggagttttaaaacactctttttcaggaatctgaaagtggatatttggagcgctttgaggcctatggtggaaaaggaaacaccttcagaaaaaaaactagagcaggagcgttctcagaaacttctttgtgatgtgtgcattcaactcacagagttgaaccttttttttgatagagcagttttgaaacactatttttgtacaatctgcggttggatgtttggagcgctttgatgcctatggtggaaaacgaaatatccgcacataaaatctagacagcagcattctcagaaacttgtttgtgttgtgtgcattcaactcacagagttgaacctttcctttgattgagcagttttgaaaaagtctttttgtagaatccacaagtggatatttggagcaatttgaggcctatggtgtaaaaggaaatatcttcacataaaaactagacagaagcattctcagaaacttctttgtgttgtgtgcattcaactcacagagttgaacttttcctatgattgagcagttttgaaacactctttctgaagaatctgcaagtggatatttggagtgccttgaggcctatggtggaaaaggaaacaccttcacaaaaaaaactagagcagaagcattctcagaaacgtcttagtgatgtgtgcattcaactcacagagttgaacttttctttgatagagcagttttgaaacactctttttgtagaatctgcagttggatatttggagcgctttgatgcctatggtggaaaaggaaatatccgcacataaaaactagacagcagcattctcagaaacttgtttgtgttgtgtgcattcaactcacagagttgacctttcctttgattgagcagttttgaaaaagtctttttgcagaatctgcaagtggatatttggagcggtttgaggcctatggtgtaaaaggaaatatcttcacataaaaactagacagaagcattctctgaaacttctttgtgatgtgtgaattcaactcacagagtcgaacctttctgttgatacagcagttttaaatcactctttttctagaatctgaaagtagatatttggagtgctctgaggcctatggtggaaaaggaaatacctacagataaaaactaggcggaagcattctcagaaatatctttgtgatgagtgcattcaactcacagagttgaacatttatgttgatagaggagttttaaaacactctttttcaggaatctgaaagtggatatttggagcgctttgaggcctatggtggaaaaggaaacaccttcacaaaaaaaaactagagcagaagcattctcagaaacgtctttgtgatgtgtgcattcaactcacagagttgaacttttctttgatagagcagttttgaaacactctttttgtagaatctgcagttggatatttggagcgctttgatgcctatggtggaaaaggaaatatccgcacataaaaactagacagcagcattctcagaaacttgtttgtgttgtgtgcattcaactcacagagttgacctttcctttgattgagcagttttgaaaaagtctttttgcagaatctgcaagtggatatttggagcggtttgaggcctatgttgtaaaaggaaatatcttcacataaaaactagacagaagcattctctgaaacttctttgtgatgtgtgaattcaactcacagagtcgaacctttctgttgatacagcagttttaaatcactctttttcgagaatctgaaagtagatatttggagtgctctgaggcctatggtggaaaaggaaatacctacagataaaaactaggcggaagcattctcagaaatatctttgtgatgagtgcattcaactcacagagttgaacatttatgttgatagaggagttttaaaacactctttttcaggaatctgaaagtggatatttggagcgctttgaggcctttggtggaaaaggaaacaccttcacaaaaaaaactagagcagaagcattctcagaaacttctttgtgatgtgtgcattcaactcacagagttgaaccttttttttggatagagcagttttgaaacactatttttgtacaatctgcggttggatatttggagcgctttgatgcctatggtggaaaacgaaatatccgcacataaaatctagacagcagcattctcagaaacttgtttgtgttgtgtgcattcaactcacagagttgaacctttcctttgattgagcagttttgaaaaagtctttttgtagaatccacaagtggatatttggagcagtttgaggcctatggtgtaaaaggaaatatcttcacataaaaactagacagaatcattctcagaaacttctttgtgttgtgtgcattcaactcacagagttgaaattttcctatgattgagcagttttgaaacactctttctgaagaatctgcaagtggataattggagcgctttgaggcctatggtggaaaaggaaacaccttcacaaaaaaactagagcagaagcattctcagaaacgtctttgtgatgtgtgcattcaactcacagagttgaacctttctttgatagagcagttttgaaacactctttttgtagaatctgcagttggatatttggagcgctttgatgcctatggtggaaaaggaaatatccgcacataaaaactagacagcagcattctcagaaacttgtttgtgttgtgtgcattcaactcacagagttgacctttcctttgattgagcagttttgaaaaagtctttttgcagaatctgcaagtggatatttggagcggtttgaggcctatggtgtaaaaggaaatatcttcacataaaaactagacagaagcattctctgaaacttctttgtgatgtgtgaattcaactcacagagttgaacctttcttttgtagagcagttttgaaactctttttgtagaatctgtaagtagatatttggagcgctttgaggcttacgttggaaaagtaaatatcttcacataaaaactagacagaagcattctcagaaacttctttgtgataagtgcattcaactcacagagtcgaacctttctgttgatagagcagttttaaatcactctttttctagaatctgaaagtggatatttggagtgctctgaggcctatggtggaaaaggaaatacctacacataaaaactaggcggaagcattctcagaaatatctttgtgatgagtgcattcaactcacagagttgaacatttatgttgatagaggagttttaaaacactctttttcaggaatctgaaagtggatatttggagcgctttgaggcctatggtggaaaaggaaacaccttcacaaaaaaaactagagcagaagcattctcaggaacttctttgtgatgtgtccattcaactcacagagttgaacctttttttttggatagagcagttttgaaacactatttttgtacaatctgcggttggatatttggagcgctttgatgcctatggtggaaaacgaaatatccgcacataaaatctagacagcagcattctcagaaacttgtttgtgttgtgtgcattcaactcacagagttgaacctttcctttgattgagcagttttgaaaaagtctttttgtagaatccacaagtggatatttggagcagtttgaggcctatggtgtaaaaggaaatatcttcacataaaaactagacagaagcattctctaaaacttctttgtgatgtgttaattcaactcacagagttgaacctttcttttgtagagcagttttgaaactgtttttgtaaaatctgtaagtagatatttggagcgctttgagggttattgtggaaaaggaaatatcttcacataaaaactagacagaagcattctcagaaacttctttgtgataagtgcattcaactcacagagtcgaacctttctgttgatagagcagttttaaatcactctttttctagaatctgaaagtggatatttggagtgctctgaggcctatggtggaaaaggaaatacctacacataaaaactaggcggaagcattctgagaaatatctttgtgatgagtgcattcaactcacagagttgaacatttatgttgatagaggagttttaaaacactctttttcaggaatctgaaagtggatatttggagcgctttgaggcctatggtggaaaaggaaacaccttcacaaaaaaaaactagagcagaagcattctcagaaacgtctttgtgatgtgtgcattcaactcacagagttgaacctttctttgatagagcagttttgaaacactctttttgtagaatctgcagttggatatttggagcgctttgatgcctatggtggaaaaggaaatatccgcacataaaaactagacagcagcattctcagaaacttgtttgtgttgtgtgcattcaactcacagagttgacctttcctttgattgagcagttttgaaaaagtctttttgcagaatctgcaagtggatatttggagcggtttgaggcctatggtgtaaaaggaaatatcttcacataaaaactagacagaagcattctctgaaacttctttgtgatgtgtgaattcaacacacagagtcgaacctttctgttgatagagcagttttaaatcactctttttctagaatctgaaagtggatatttggagtgctctgaggcctatggtggaaaaggaaatacctacagataaaaactaggcggaagcattctcagaaatatctttgtgatgagtgcattcaactcacagagttgaacatttatgttgatagaggagttttaaaacactctttttcaggaatctgaaagtggatatttggagcgctttgaggcctatggtggaaaaggaaacaccttcacaaaaaaaactagagcagaagcattctcagaaacttctttgtgatgtgtgcattcaactcacagagttgaaactttttttttgatagagcagttttgaaacactatttttgtacaatctgcggttggatgtttggagcgctttgatgcctatggtggaaaacggaatatccgcacgtaaaatctagacagcagcattctcagaaacttgtttgtgttgtgtgcattcaactcacagagttgacctttccattgattgagcagttttgaaaaagtctttttgcagaatctgcaagtggatatttggagcagtttgaggcctatggtgtaaaaggaaatatcttcacataaaaactagacagaagcattctctgaaacttctttgtgatgtgtgaattcaacacacagagtcgaacctttctgttgatagagcagttttaaatcactctttttctagaatctgaaagtggatatttggagtgctctgaggcctatggtggaaaaggaaatacctacacataaaaactaggcggaagcattctcagaaatatctttgtgatgagtgcattcaactcacagagttgaacatttatgttcatagaggagttttaaaacactctttttcaggaatctgaaagtggatatttggagcgctttgaggcctatggtggaaaaggaaacaccttcacaaaaaaaactagagcagaagcattctcagaaacttctttgtgatgtgtgcattcaactcacagagttgaacctttttttttgatagagcagttttgaaacactatttttgtacaatctgcggttggatgtttggagcgctttgatgcctatggtggaaaacggaatatccgcacataaaatctagacagcagcattctcagaaacttgtttgtattgtgtgcattcaactcacagagttgaacctttcctttgattgagcagttttgaaaaagtctttttgtagaatccacaggtggatatttggagcagtttgaggcctatggtgtaaaaggaaatatcttcacataaaaactagacagaagcattctcagaaacttctttgtgttgtgtgcattcaactcacagagttgaacttttcctatgatttagcagttttgaaacactctttctgaggaatctgcaagtggatatttggagcgctttgaggcctatggtggaaaaggaaacaacttcacaaaaaaaactagagcagaagcattctcagaaacgtctttatgatgtgtgcattcaactcacagagttgaacctttctttgatagagcagttttgaaacactctttttgtagaatcagcagttggatatttggagcgctttgatgcctatgttggaaaaggaaatatccgcacataaaaactagacagcagcattctcagaaacttgtttgtgttgtgtgcattcaactcacagagttgacctttcctttgattgagcagttttgaaaaagtctttttgcagaatctgcaagtggatatttggagcggtttgagacctatggtgtaaaaggaaataccttcacataaaaactagacagaagcattctctgaaacttctttgtgatgtgtgaattcaactcaaagagttgaacctttcttttgtagagcagatttgaaactctttttgtacaatctgtaagtagatatttggagcgctttgaggcttatggtggaaaaggaagtatcttcacataaaaactagagagaagcattctcagaaacttctttgtgataagtgcattcaactcacagagtcgaacctttctgttgatagagcagttttaaatcactctttttctagaatctgaaagtggatatttggagtgctctgaggcctatggtggaaaaggaaatacctacacataaaaactaggcggaagcattctcagaaatatctttgtgatgagtgcattcaactcacagagttgaacatttatgttgatagaggagttttaaaacactctttttcaggaatctgaaagtggatatttggagcgctttgaggcctatggtggaaaaggaaacaccttcagaaaaaaaactagagcaggagcgttctcagaaacttctttgtgatgtgtgcattcaaacgaattccgcactaaatctagcagcgcatctcagaactgtttgtgtgtgtgcatcaactcacagagtgacccctttcctttgatgagcagttttgaaaaagtctttttgtagaatccacaagtggatatttggagcagtttgaggcctatggtgtaaaaggaaatatcttcacataaaaactagacagaagcattctcagaaacttctttgtgttgtgtgcattcaactcacagagttgaacttttcctatgattgagcagttttgaaacactctttctgaagaatctgcaagtggatatttggagcgctttgaggcctatggtggaaaaggaaacaccttcacaaaaaaactagagcagaagcattctcagaaacgtctttgtgatgtgtgcattcaactcacagagttgaacctttctttgatagagcagttttgaaacactctttttgtagaatctgcagttggatatttggagcgctttgatgcctatggtggaaaaggaaatatccgcacataaaaactagacagcagcattctcagaaacttgtttgtgttgtgtgcattcaactcacagagttgacctttcctttgattgagcagttttgaaaaagtctttttgcagaatctgcaagtggatatttggagcggtttgaggcctatggtgtaaaaggaaatatcttcacataaaaactagacagaagcattctctgaaacttctttgtgatgtgtgaattcaactcacagagttgaacctttcttttgtagagcagttttgaaactctttttgtagaatctgtaagtagatatttggagcgctttgaggcttatggtggaaaaggaaatatcttcacataaaaactagacagaagcattctcagaaacttctttgtgataagtgcattcaactcacagagtcgaacctttctgttgatagagcagttttaaatcactctttttctagaatctgaaagtggatatttggagtgctctgaggcctatggtggaaaaggaaatacctacacataaaaactaggcggaagcattctcagaaatatctttgtgatgagtgcattcaactcacagagttgaacatttatgttgatagaggagttttaaaacactctttttcaggaatctgaaagtggatatttggagcgctttgaggcctatggtggaaaaggaaacaccttcacaaaaaaaactagagcagaagcattctcaggaacttctttgtgatgtgtgcattcgactcacagagttgaaccttttttttggatagagcagttttgaaacactatttttgtacaatctgcggttggatatttggagcgctttgatgcctatggtggaaaacgaaatatccgcacataaaatctagacagcagcattctcagaaacttgtttgtgttgtgtgcattcaactcacagagttgaacctttcctttgattgagcagttttgaaaaagtctttttgtagaatccacaagtggatatttggagcagtttgaggcctatggtgtaaaaggaaatatcttcacataaaaactagacagaagcattctcagaaacttctttgtgttgtgtgcattcaactcacagagttgaacttttcctatgattgagcagttttgaaacactctttctgaagaatctgcaagtggatatttggagcgctttgaggcctatggtggaaaaggaaacaccttcacaaaaaaactagagcagaagcattctcagaaacgtctttgtgatgtgtgcattcaactcacagagttgaacctttctttgatagagcagttttgaaacactctttttgtagaatctgcagttggatatttggagcgctttgatgcctatggtggaaaaggaaatatccgcacataaaaactagacagcagcattctcagaaacttgtttgtgttgtgtgcattcaactcacagagttgagctttcctttgattgagcagttttgaaaaagtctttttgcagaatctgcaagtggatatttggagcggtttgaggcctatggtgtaaaaggaaatatcttcacataaaaactagacagaagcattctctgaaacttctttgtgatgtgtgaattcaactcacagagttgaacctttcttttgtagagcagttttgaacctctttttgtagaatctgtaagtagatatttggagcgctttgaggcttatggtggaaaaggaaatatcttcacataaaaactagacagaagcattctcagaaacttctttgtgataagtgcattcaactcacagagtcgaacctttctgttgatagagcagttttaaatcactctttttctagaatctgaaagtggatatttggagtgctctgaggcctatggtggaaaaggaaatacctacacataaaaactaggcggaagcattctcagaaatatctttgtgatgagtgcattcaactcacagagttgaacatttatgttgatagaggagttttaaaacactctttttcaggaatctgaaagtggatatttggagcgctttgaggactttggtggaaaagggaacaccttcacaaaaaaaactagagcagaagcatctcagaagattcttgtgatgtgtgcattcactcacagagtcgaacttttttttgatagagcagtcttgaacactattttgtacatctgcggtggatattggagcgctgatgctataagtgcattcaactcacagagtcgaacctttctgttgatagagcagttttaaatcactctttttctagaatctgaaagtggatatttggagtgctctgaggcctatggtggaaaaggaaatacctacacataaaaactaggcggaagcattctgagaaatatctttgtgatgagtgcattcaactcacagagttgaacatttatgttgatagaggagttttaaaacactctttttcaggaatctgaaagtggatatttggagcgctttgaggcctatggtggaaaaggaaacaccttcacaaaaaaaactagagcagaagcattctcagaaacttctttgtgatgtgtgcattcaactcagagagttgaacctttttttttgatagagcagttttgaaacactatttttgtacaatctgcggttggatgtttggagcgctttgatgcctatggtggaaaacgaaatatccgcacataaaatctagacagcagcattctcagaaacatgtttgtgttgtgtgcattcaactcacagagttgaacctttcctttgattgagcagttttgaaaaagtctttttgtagaatccacaagtggatatttggagcagtttgaggcctatggtgtaaaaggaaataacttcacataaaaactagacagaagcattctcagaaacttctttgtgttgtgtgcattcaactcacagagttgaacttttcctatgattgagcagttttgaaacactctttctgaagaatctgcaagtggatatttggagcgctttgaggcctatggtggaaaaggaaacaccttcacaaaaaaaactagagcagaagcattctcagaaacgtctttgtgatgtgtgcattcaactcacagagttgcacctttctttgatagagcagttttgaaacactctttttgtagaatctgcagttggatatttggagcgctttgatgcctatggtggaaaaggaaatatccgcacataaaaactagacagcagcattctcagaaacttgtttgtgttgtgtgcattcaactcacagagttgaactttcctttgattgagcagttttgaaaaagtctttttgcagaatctgcaagtggatatttggagcggtttgaggcctatggtgtaaaaggaaatatcttcacataaaaactagacagaagcattctctgaaacttctttctgaggtgtgaattcaactcacagagttgaacctttcttttgtagagcagttttgaaactctttttgtagaatctgtaagtagatatttggagcgctttgaggcttatggtggaaaaggaaatatcttcacataaaaactagacagaagcattctcagaaacttctttgtgataagtgcattcaactcacagagtcgaacctttctgttgatagagcagatttaaatcactcttcttctagaatctgaaagtggatatttggagtgctctgaggcctatggtggaaaaggaaatacctacacataaaaactaggcggaagcattctcagaaatatgtttgtgatgagtgcattcaactcacagtgttaaacgtttatgttgattgaggagttttaaaacactctttttcaggaatctgaaagtggatatttggagcgctttgaggcctatggtggaaaaggaaacaccttcacaaaaaaaactagagcagaagcattctcagaaacttctttgtgatgtgtgcattcaactcacagagttgaaccttttttttgatagagcagttttgaaacactatttttgtacaatctgcggttggatgtttggagcgctttgatgcctatggtggaaaacgaaatatccgcacataaaatctagacagcagcattctcagaaacttgtttgtgttgtgtgcattcaactcacagagttgaacctttcctttcattgagcagttttgaaaaagtctttttgtagaatccacaagtggatatttggagcagtttgaggcctatggtgtaaaaggaaataacttcatataaaaactagacagaagcattctcagaaacttctttgtgttgtgtgcattcaactcacagagttgaacttttcctatgattgagcagttttgaaacactctttctgaagaatctgcaagtggatatttggagcgctttgaggcctatggtggaaaaggaaacaccttcacaaaaaaaactagagcagaagcattctcagaaacgtctttgtgatgtgtgcattcaactcacagagttgaacctttctttgatagagcagttttgaaacactctttttgtagaatctgcagttggatatttggagcgctttgatgcctgtggtggaaaaggaaatatccgcacataaaaactagacagcagcattctcagaaacttgtttgtgttgtgtgcattcaactcacagagttgacctttcctttgattgagcagttttgaaaaagtctttttgcagaatctgcaaatggatatttggagcggtttgaggcctatggtgtaaaaggaaatatcttcacataaaaactagacagaagcattctcagaaacttctttgtgataagtgcattcaactcacagagtcgaacctttctgttgatagagaagttttaaatcactgttcttctagaatctgaaagtggatatttggagtgctctgaggcttatggtggaaaaggaaatacctacacataaaaactaggcggaagcattctcagaaatatctttgtgatgagtgcattcaactcacagagttgaacatttatgttgatagaggagttttaaaacactctttttcaggaatctgaaagtggatatttggagcgctttgaggcctatggtggaaaaggaaacaccttcacaaaaaaaactagagcagaagcattctcagaaactactttgtgatgtgtgcattcaactcacagagttgaaccttttttttgatagagcagttttgaaacactatttttgtacaatctgcggttggatgtttggagcgctttgatgcctatggtggaaaacgaaatctccgcacataaaatctagacagcagcattctcagaaacttgtttgtgttgtgtgcattcaactcacagagttgaacctttcctttgattgagcagttttgaaaaagtctttttatagaatccacaagtggatatttggagcagtttgaggcctatggtgtaagaggaaatattttcacataaaaactagacagaagcattctcagaaacttctttgtgttgtgtgcattcaactcacagagttgaacttttcctatgattgagcagttttgaaacactctttctgaagaatctgcaagtggatatttggagtgctttgaggcctatggtggaaaaggaaacaccttcacaaaaaaactagagcagaagcattctcagaatcttctttgtgatgtgtgcattcaactcacagagttgaacctttttttttgatagagcagttttgaaacactatttttgtacaatctgcggttggatatttggagcgctttgatgcctatggtggaaaacgaaatatccgcacataaaatctagacagcagcattctcagaaacttgtttgtgttgtgtgcattcaactcacagagttgaaactttcctttgattgagcagttttgaaaaagtctttttgtagaatccacaagtggatatttggagcagtttgaggcctatggtgtaaaaggaaatatcttcacataaaaactagacagaagcattctcagaaacttctttgtgttgtgtgcattcaactcacagagttgaacttttcctatgattgagcagttttgaaacactctttctgaagaatctgcaagtggatatttggagcgctttgaggcctatggtggaaaaggaaacaccttcacaaaaaaactagagcagaagcattctcagaaacttctttgtgatgtgtgcattcaactcacagagttgaaactttttttttgatagagcagttttgaaacactatttttgtacaatctgccgtttgatatttggatcgctttgatgcctatggtggaaaacgaaatatccgcacataaaatctagacagcagcattctcagaaacttgtttgtgttgtgtgcattcaactcacagagttgaacctttcctttgattgagcagttttgaaaaagtctttttgtagaatccacaagtggatatttggagcagtttgaggcctgtggtgtaaaaggaaatatcttcacatgaaaactagacagaagcattctcagaaacttctttgtgttgtgtgcattcaactcacagagttgaacttttcctatgattgagcagttttgaaacactctttctgaagaatctgcaagtggatatttggagcgctttgaggcctatggtggaaaaggaaacaccttcacaaaaaaactagagcagaagcattctcagaaacgtctttgtgatgtgtgcnattcactcacagagttgaactttctttgatagagcagttttgaacactctttttgtagatctgcagtggatattggagcgcttgatgctatgtggttttgaacattcttttcaggatcctgcaggggatattggagcgcttgaggcctttgtggaaaaggaaacacttccccaaaaaaactagagcagaagcattctcagaaacttctttgtgatgtgtgcattcaactcacagagttgaaactttttttttgatagagcagttttgaaacactatttttgtacaatctgcggttggatatttggagcgctttgatgcctatggtggaaaacgaaatatccgcacataaaatctagacagcagcattctcagaaacttgtttgtgttgtgtgcattcaactcacagagttgaacctttcctttgattgagcagttttgaaaaagtctttttgtagaatccacaagtggatatttggagcagtttgaggcctgtggtgtaaaaggaaatatcttcacatgaaaactagacagaagcattctcagaaacttctttgtgttgtgtgcattcaactcacagagttgaacttttcctatgattgagcagttttgaaacactctttctgaagaatctgcaagtggatatttggagcgctttgaggcctatggtggaaaaggaaacaccttcacaaaaaaactagagcagaagcattctcagaaacgtctttgtgatgtgtgcattcaactcacagagttgaacctttctttgatagagcagttttgaaacactctttttgtagaatctgcagttggatatttggagcgctttgatgcctatggtggaaaaggaaatatccgcacataaaaactagacagcagcattctcagaaacttgtttgtgttgtgtgcattcaactcacagagttgagctttcctttgattgagcagttttgaaaaagtctttttgcagaatctgcaagtggatatttggagcggtttgaggcctatggtgtaaaaggaaatatcttcacataaaaactagacagaagcattctctgaaacttctttgtgatgtgtgaattcaactcacagagttgaacctttcttttgtagagcagttttgaaactctttttgtagaatctgtaagtagatatttggagcgctttgaggcttatggtggaaaaggaaatatcttcacataaaaactagacagaagcattctcagaaacttctttgtgataagtgcattcaactcacagagtcgaacctttctgttgatagagcagttttaaatcactctttttctagaatctgaaagtggatatttggagtgctctgaggcctatggtggaaaaggaaatacctacacataaaaactaggccgaagcattctcagaaatatctttgtgatgagtgcattcaactcacagagttgaacatttatgttgatagaggagttttaaaacactctttttcaggaatctgaaagtggatatttggagcgctttgaggcctatggtggaaaaggaaacaccttcacaaaaaaaactagagcagaagcattctcaggaacttctttgtgatgtgtgcattcaactcacagagttgaacctttttttttgatagagcagttttgaaacactatttttgtacaatctgcggttggatatttggagcgctttgatgcctatggtggaaaacgaaatatccgcacataaaatctagacagcagcattctcagaaacttgtttgtgttgtgtgcattcaactcacagagttgaaactttcctttgattgagcagttttgaaaaagtctttttgtagaatccacaagtggatatttggagcagtttgaggcctatggtgtaaaaggaaatatcttcacataaaaactagacagaagcattctcagaaacttctttgtgttgtgtgcattcaactcacagagttgaacttttcctatgattgagcagttttgaaacactctttctgaagaatctgcaagtggatatttggagcgctttgaggcctatggtggaaaaggaaacaccttcacaaaaaaactagagcagaagcattctcagaaacgtctttgtgatgtgtgcattcaactcacagagttgaacctttctttgatagagcagttttgaaacactctttttgtagaatctgcagttggatatttggagcgctttgatgcctatggtggaaaaggaaatatccgcacataaaaactagacagcagcattctcagaaacttgtttgtgttgtgtgcattcaactcacagagttgacctttcctttgattgagcagttttgaaaaagtcttttgcagaatctgcagtggatattggagcggttgaggcctatgtgtaaaaggaatatcttcacataaaaactagacagaagcattctctgaaacttctttgtgatgtgtgaattcaactcacggagttgaacctttcttttgtagagcagttttgaaactctttttgtagaatctgtaagtagatatttggagcgctttgaggcttatggtggaaaaggaaatatcttcacatgaaaactagacagaagcattctcagaaacttctttgtgttgtgtgcattcaactcacagagttgaacttttcctatgattgagcagttttgaaacactctttctgaagaatctgcaagtggatatttggagcgctttgaggcctatggtggaaaaggaaacaccttcacaaaaaaactagagcagaagcattctcagaaacgtctttgtgatgtgtgcattcaactcacagagttgaacctttctttgatagagcagttttgaaacactctttttgtagaatcggcagttggatatttggagcgctttgatgcctatggtggaaaaggaaatatccgcacataaaaactagacagcagcattctcagaaacttgtttgtgttgtgtgcattcaactcacagagttgacctttcctttgattgagcagttttgaaaaagtctttttgcagaatctgcaagtggatatttggagcggtttgaggcctatggtgtaaaaggaaatatcttcacataaaaactagacagaagcattctctgaaacttctttgtgatgtgtgaattcaactcacggagttgaacctttcttttgtagagcagttttgaaactctttttgtagaatctgtaagtagatatttggagcgctttgaggcttatggtggaaaaggaaatatcttcacataaaaagtagacagaagcattctcagaaacttctttgtgataagtgcattcaactcacagagtcgaacctttctgttgatagagcagttttaaatcactctttttctagaatctgaaagtggatatttggagtgctctgaggcctatggtggaaaaggaaatacctacacataaaaactaggcggaatcattctcagaaatatctttgtgatgagtgcattcaactcacagagttgaacatttatgttgatagaggagttttaaaacactctttttcaggaatctaaaagtggatatttggagcgctttgaggcctatggtggaaaaggaaacaccttcacaaaaaaaactagagcagaagcattctcaggaacttctttgtgatgtgtgcattcaactcacagagttgaacctttttttttgatagagcagttttgaaacactatttttgtacaatctgcggttggatgtttggagcgctttgatgcctatggtggaaaacgaaatatccgcacataaaatctagacagcagcattctcagaaacttgtttgtgttgtgtgcattcaactcacagagttgaacctttcctttgattgagcagtttcgaaaaagtctttttgtagaatccacaagtggatatttggagcagtttgaggcctatggtgtaaaaggaaatatcttcacataaaaaccagacagaagcattctcagaaacttctttgtgttgtgtgcattcaactcacagagttgaacttttcctatgattgagcagttttgaaacactctttctgaagaatctgcaagtggatatttggagcgctttgaggcctatggtggaaaaggaaacaccttcacaaaaaaactagagcagaagcattctcagaaacgtctttgtgatgtgtgcattcaactcacagagttgaacctttctttgatagagcagttttgaaacactctttttgtagaatctgcagttggatatttggagcgctttgatgcctatgttggaaaaggaaatatccgcacataaaaactagacagcagcattctcagaaacttgtttgtgttgtgtgcattcaactcacagagttgacctttcctttgattgagcagttttgaaaaagtctttttgcagaatctgcaagtggatatttggagcggtttgaggcctatggtgtaaaaggaaatatcttcacataaaaactagacagaagcattctctgaaacttctttgtgatgtgtgaattcaactcacggagttgaacctttcttttgtagagcagttttgaacctctttttgtagaatctgtaagtagatatttggagcgctttgaggcttatggtggaaaaggaaatatcttcacataaaaactagacagaagcattctcagaaacttctttgtgatcagtgcattcaactcacagagtcgaacctttctgttgatggagcagttttaaatcactctttttctagaatctgaacgtggatatttggagtgctctgaggcctatggtggaaaaggaaatacctacacataaaaactaggcggaagcattctcagaaatatctttgtgatgagtgcattcaactcacagagttgaacatttatgttgatagaggagttttaaaacactctttttcaggaatctgaaagtggatatttggagcgctttgaggactttggtggaaaaggaaacaccttcacaaaaaaaactagagcagaagcattctcagaagattctttgtgatgtgtgcattcaactcacagagttgaaacttttttttggatagagcagttttgaaacactatttttgtacaatctgcggttggatatttggagcgctttgatgcctatggtggaaaacgaaatatccgcacataaaatctagacagcagcattctcagaaacttgtttgtgttgtgtgcattcaactcacagagttgaacctttcctttgattgagcagttttgaaaaagtctttttgtagaatccacaagtggatatttggagcagtttgaggcctgtggtgtaaaaggaaatatcttcacatgaaaactagacagaagcattctcagaaacttctttgtgttgtgtgcattcaactcacagagttgaacttttcctatgattgagcagttttgaaacactctttctgaagaatctgcaagtggatatttggagcgctttgaggcctatggtggaaaaggaaacaccttcacaaaaaaactagagcagaagcattctcagaaacgtctttgtgatgtgtgcattcaactcacagagttgaacctttctttgatagagcagttttgaaacactctttttgtagaatctgcagttggatatttggagcgctttgatgcctatggtggaaaaggaaatatccgcacataaaaactagacagcagcattctcagaaacttgtttgtgttgtgtgcattcaactcacagagttgacctttcctttgattgagcagttttgaaaaagtctttttgcagaatctgcaagtggatatttggagcgctttgaggactttggtggaaaaggaaacaccttcacaaaaaaaactagagcagaagcattctctgaaacttctttgtgatgtgtgaattcaactcacagagttgaacctttcttttgtagagcagttttgaaactctttttgtagaatctgtaagtagatatttggagcgctttgaggcttatggtggaaaaggaaatatcttcacataaaaactagacagaagcattctcagaaacttctttgtgttgtgtgcattcaactcacagagttgaacttttcctatgattgagcagttttgaaacactctttctgaagaatctgcaagtggatatttggagccctttgaggcctatggtggaaaaggaaacaccttcacaaaaaaactagagcagaagcattctcagaaacgtctttgtgatgtctagcagcagcttcttataagttgtttgtggtggtgcgttcaactcaccgaggtgaacctttcctctgatggagcgcttttgaaaaactctttttgtagaatccacaagtggatatttggagcgctttgaggcttatggtgtaaaaggaaatatcttcacataaaaactagacagaagcattctcagaaacttctttgtgttgtgtgcattcaactcacagagttgaacttttcctatgattgagcagttttgaaacactctttctgaagaatctgcaagtggatatttggagccctttgaggcctatggtggaaaaggaaacaccttcacaaaaaaactagagcagaagcattctcagaaacgtctttgtgatgtgtgcattcaactcacagagttgaacctttctttgatagagcagttttgaaacactctttttgtagaatctgcagttggatatttggagcgctttgatgcctatggtggaaaaggaaatatccgcacataaaaactagacagcagcattctcagaaacttgtctgtgttgtgtgcattcaactcacagagttgagctttcctttgattgagcagttttgaaaaagtctttttgcagaatctgcaagtggatatttggagcggtttgaggcctatggtgtaaaaggaaatatcttcacataaaaactagacaggagcattctctgaaacttctttgtgatgtgtgaattcaactcacagagttgaacctttcttttgtagagcagttttgaaactctttttgtagaatgtgtaagtagatatttggagcgctttgaggcttatggtggaaaaggaaatatcttcacataaaaactagacagaagcattctcagaaacttctttgtgataagtgcattcaactcacagagtcgaacctttctgttgatagagcagttttaaatcactctttttctagaatctgaaagtggatatttggagtgctctgaggcctatggtggaaaaggaaatacctacacataaaaactaggcggaagcattctcagaaatatctttgtgatgagtgcattcaactcacagagttgaacatttatgttgatagaggagttttaaaacactctttttcgggaatctgaaagtggatatttggagcgctttgaggcctatggtggaaaaggaaacaccttcacaaaaaaaactagagcagaagcattctcagaaagttctttgtgatgtgtgcattcaactcacagagttgaatctttttttttgatagagcagttttgaaacactatttttgtacaatctgcagttggatattcggagcgctttgatgcctatggtggaaaacgaaatatacgcacataaaatctagacagcaacattctcagaaacttgtttgtgttgtgtgcattcaactcacagagttgaacctttcctttgattgagcagttttgaaaaagtctttttgtagaatccacaagtggatatttggagcagtttgaggcctatggtgtaaaaggaaatatcttcacataaaaactagacagaagcattctcagaaacttctttgtgttgtgtgcattcaactcacagagttgaacttttcctatgattgagcagttttgaaacactctttctgaagaatctgcaagtggatatttggagcgctttgaggcctatggtggaaaaggaaacaccttcacaaaaaaactagagcagaagcattctcagaaacgtctttgtgatgtgtgcattcaactcacagagttgaacctttctttgatagagcagttttgaaacactctttttgtagaatctgcagttggatatttggagcgctttgatgcctatggtggaaaaggaaatatccgcacataaaaactagacagcagcattctcagaaacttgtttgtgttgtgtgcattcaactcacagagttgagctttcctttgattgagcagttttgaaaaagtctttttgcagaatctgcaagtggatatttggaaatatctcacataaaactagacagagcatctcagaacttcttgtgatagtgcatcaactcacagagtcgacctttctgtgatagagcagtttaaatcactcttnttctagaatctgaaagtggatatttggagtgctctgaggcctatggtggaaaaggaaatacctacacataaaaactaggcggaagcattctcagaaatatctttgtgatgagtgcattcaactcacagagttgaacatttatgttgatagaggagttttaaaacactctttttcaggaatctgaaagtggatgtttggagcgctttgaggcctatggtggaaaaggaaacaccttcacaaaaaaaactagagcagaagcattctcaggaacttctttgtgatgtgtgcattcaactcacagagttgaaacttttttttggatagagcagttttgaaacactatttttctacaatctgcggttggatatttggagcgctttgatacctatggtggaaaacgaaatatccgcacataaaatctagacagcagcattctcagaaacttgtttgtgttgtgtgcattcaactcacagagttgaacctttcctttgattgagcagttttgaaaaagtctttttgtagaatccacaagtggatatttggagcagtttgaggcctatggtgtaaaaggaaatatcttcacataaaaactagacagaagcattctcagaaacttctttgtgttgtgtgcattcaactcacagagttgaacttttcctatgattgagcagttttgaaacactctttctgaagaatctgcaagtggatatttggagcgctttgaggcctatggtggaaaaggaaacaccttcacaaaaaaactagagcagaagcattctcagaaacgtctttgtgatgtgtgcattcaactcacagagttgaacctttctttgatagagcagttttcacacactctttttgtagaatctgcagttggatatttggagcgctttgatgcctatggtggaaaaggaaatatccgcacataaaaactagacagcagcattctcagaaacttgtttgtgttgtgtgcattcaactcacagagttgagctttcctttgattgagcagttttgaaaaagtctttttgcagaatctgcaagtggatatttggagcggtttgaggcctatggtgtaaaaggaaatatcttcacataaaaactagacagaagcattctctgaaacttctttgtgatgtgtgaattcaactcacagagttgaacctttcttttgtagagcagttttgaaactctttttgtagaatctgtaagtagatatttggagcgctttgaggcttatggtggaaaaggaaatatcttcacataaaaactagacagaagcattctcagaaacttctttgtgataagtgcattcaactcacagagtcgaacctttctgttgatagagcagttttaaatcactctttttctagaatctgaaagtggatatttggagtgctctgaggcctatggtggaaaaggaaatacctacacataaaaactaggcggaagcattctcagaaatatctttgtgatgagtgcattcaactcacagagttgaacatttatgttgttagaggagttttaaaacactcttttgcaggaatctgaaagtggatatttggagcgctttgaggactttggtggaaaaggaaacaccttcacaaaaaaaactagagcagaagcattctcagaagattctttgtgatgtgtgcattcaactcacagagttgaaactttttttttgatagagcagttttgaaacactatttttgtacaatctgcggttggatatttggagcgctttgatgcctatggtggaaaacgaaatatccgcacataaaatctagacagcagcattctcagaaacttgtttgtgttgtgtgcattcaactcacagagttgaacctttcctttgattgagcagttttgaaaaagtctttttgtagaatccacaagtggatatttggagcagtttgaggcctgtggtgtaaaaggaaatatcttcacatgaaaactagacagaagcattctcagaaacttctttgtgttgtgtgcattcaactcacagagttgaacttttcctatgattgagcagttttgaaacactctttctgaagaatctgcaagtggatatttggagcgctttgaggcctatggtggaaaaggaaacaccttcacaaaaaaagctagagcagaagcattctcagaaacgtctttgtgatgtgtgcattcaactcacagagttgaacctttctttgatagagcagttttgaaacactctttttgtagaatctgcagttggatatttggagcgctttgatgcctatggtggaaaaggaaatatccgcacataanaactagacagcagcattctcagaaacttgtttgtgttgtgtgcattcaactcacagagttgaactttcctttgattgagcagttttgaaaaagtctttttgcagaatctgcaagtggatatttggagcggtttgaggcctatggtgtaaaaggaaatatcttcacataaaaactagacagaagcattctctgaaacttctttctgaggtgtgaattcaactcacagagttgaacctttcttttgtagagcagttttgaaactctcttttgtagaatctgtaagtagatatttggagcgctttgaggcttatggtggaaaaggaaatatcttcacataaaaactagacagaagcattctcagaaacttctttgtgataagtgcattcaactcacagagtcgaacctttctgttgatagagcagatttaaatcactcttcttctagaatctgaaagtggatatttggagtgctctgaggcctatggtggaaaaggaaataccttcacaaaaaaactagagcagaagcattctcagaaacgtctttgtgatgtgtgcattcaactcacagagttgaacctttctttgatagagcagttttgaaacactctttttgtagaatctgcagttggatatttggagcgctttgatgcctatggtggaaaaggaaatatccgcacataaaaactagacagcagcattctcagaaacttgtttgtgttgtgtgcattcaactcacagagttgagctttcctttgattgagcagttttgaaaaagtctttttgcagaatctgcaagtggatatttggagcggtttgaggcctatggtgtaaaaggaaatatcttcacataaaaactagacagaagcattctctgaaacttctttgtgatgtgtgaattcaactcacagagttgaacctttcttttgtagagcagttttgaaactctttttgtagaatgtgtaagtagatatttggagcgctttgaggcttatggtggaaaaggaaatatcttcacataaaaactagacagaagcattctcagaaacttctttgtgataagtgcattcaactcacacagtcgaacctttctgttgatagagcagttttaaatcactctttttctagaatctgaaagtggatatttggagtgctttgaggcctatggtggaaaaggaaatacctacacataaaaactaggcggaagcattctcagaaatatctttgtgatgagtgcattcaactcacagagttgaacatttatgttgatagaggacttttaaaagactctttttcaggaatctgaaagtggatatttggagcgctttgaggcctatggtggaaaaggaaacaccttcacaaaaaaaactagagcagaagcattctcagaaacttctttgtgatgtgtgcattcaactcacagagttgaacctttttttttgatagagcagttttgaaacactatttttgtacaatctgcggttggatatttggagggctttgatgcctatggtggaaaacgaaatatccgcacataaaatctagacagcagcattctcagaaacttgtttgtgttgtgtgcattcaactcacagagttgaacctttcctttgattgagcagttttgaaaaagtctttttgtagaatccacaagtggatatttggagcagtttgaggcctatggtgtaaaaggaaatatcttcacataaaaactagacagaagcattctcagaaacttctttgtgttgtgtgcattcaactcacagagttgaacttttcctatgattgagcagttttgaaacactctttctgaagaatctgcaagtggatatttggagccctttgaggcctatggtggaaaaggaaacaccttcacaaaaaaactagagcagaagcattctcagaaacgtctttgtgatgtgtgcattcaactcacagagttgaacctttctttgatagagcagttttgaaacactctttttgtagaatctgcagttggatatttggagcactttgatgcctatggtggaaaaggaaatatccgcacataaaaactagacagcagcattctcagaaacttgtctgtgttgtgtgcattcaactcacagagttgagctttcctttgattgagcagttttgaaaaagtctttttgcagaatctgcaagtggatatttggagcggtttgaggcctatggtgtaaaaggaaatatcttcacataaaaactagacaggagcattctctgaaacttctttgtgatgtgtgaattcaactcacagagttgaacctttcttttgtagagcagttttgaaactctttttgtagaatgtgtaagtagatatttggagcgctttgaggcttatggtggannaggaatatcttcacataaaactagacagaagcatctcagaaacttcttgtgatagtgcattcactcacagagtcgaaccttctgtgatagagcagttttaatcactctttctagatctgaagtgatatttgattgtacaatctgcggttggatatttggagcgctttgatgcctatggtggaaaacgaaatatccgcacataaaatctagacagcagcattctcagaaacttgtttgtgttgtgtgcattcaactcacagagttgaacctttcctttgattgagcagttttgaaaaagtctttttgtagaatccacaagtggatatttggagcagtttgaggcctatggtgtaaaaggaaatatcttcacataaaaactagacagaagcattctcagaaacttctttgtgttgtgtgcattcaactcacagagttgaacttttcctatgatttagcagttttgaaacactctttctgaagaatctgcaagtggatatttggagcgctttgaggcctatggtggaaaaggaaacaccttcacaaaaaaactagagcagaagcattctcagaaacgtctttgtgatgtctgcattcaactcacatagttgaacctttctttgatagagcagttttgaaacactctttttgtagaatctgcagttggatatttggagcgctttgatgcctatggtggaaaaggaaatatccgcacataaaaactagacagcagcattctcagaaacttgtttgtgttgtgtgcattcaactcacagagttgagctttcctttgattgagcagttttgaaaaagtctttttgcagaatctgcaagtggatatttggagcggtttgaggcctatggtgtaaaaggaaatatcttcacataaaaactagacagaagcattctctgaaacttctttgtgatgtgtgaattcaactcacagagttgaacctttcttttgtagagcagttttgaacctctttttgtagaatctgtaagtagatatttggagcgctttgaggcttatggtggaaaaggaaatatcttcacataaaaactagacagaagcattctcagaaacttctttgtgatcagtgcattcaactcacagagtcgaacctttctgttgatagagcagttttaaatcactctttttctagaatctgaaagtggatatttggagtgctctgaggcctatggtggaaaaggaaatacctacacataaaaactaggcggaagcattctcagaaatatctttgtgatgagtgcattgaactcacagagttgaacatttatgttgatagaggagttttaaaacactctttttcaggaatctgaaagtggatatttggagcgctttgaggactttggtggaaaaggaaacaccttcacaaaaaaaactagagcagaagcattctcagaagattctttgtgatgtgtgcattcaactcacagagttgaaactttttttttgatagagcagttttgaaacactatttttgtacaatctgcggttggatatttggagcgctttgatgcctatggtggaaaacgaaatatccgcacataaaatctagacagcagcattctcagaaacttgtttgtgttgtgtgcattcaactcacagagttgaacctttcctttgattgagcagttttgaaaaagtctttttgtagaatccacaagtggatatttggagcagtttgaggcctgtggtgtaaaaggaaatatcttcacatgaaaactagacagaagcattctcagaaacttctttgtgttgtgtgcattcaactcacagagttgaacttttcctatgattgaacagttttgaaacactctttctgaagaatctgcaagtggatatttggagcgctttgaggcctatggtggaaaaggaaacaccttcacaaaaaaactagagcagaagcattctcagaaacgtctttgtgatgtgtgcattcaactcacagagttgaacctttctttgatagagcagttttgaaacactctttttgtagaatctgcagttggatatttggagcgctttgatgcctatggtggaaaaggaaatatccgcacataaaaactagacagcagcattctcagaaacttgtttgtgttgtgtgcattcaactcacagagttgagctttcctttgattgagcagttttgaaaaagtctttttgcagaatctgcaagtggatatttggagcggtttgaggcctatggtgtaaaaggaaatatcttcacataaaaactagacagaagcattctctgaaacttctttgtgatgtgtgaattcaactcacagagttgaacctttcttttgtagagcagttttgaaactctttttgtagaatctgtaagtagatatttggagcgctttgaggcttatggtggaaaaggaaatatcttcacataaaaactagacagaagcattctcagaaacttctttgtgataagtgcattcaactcacagagtcgaacctttctgttgatagagcagttttaaatcactctttttctagaatctgaatgtggatatttggagtgctctgaggcctatggtggaaaaggaaatacctacacataaaaactaggcggaagcattctcagaaatatctttgtgatgagtgcattcaactcacagagttgaacatttatgttgatagaggagttttaaaacactctttttcaggaatctgaaagtggatatttggagcgctttgaggcctatggtggaaaaggaaacaccttcacaaaaaaaactagagcagaagcattctcaggaacttctttctgatgtgtgcattcaactcacagagttgaacctttttttttgatagagcagttttgaaacactatttttgtacaatctgcggttggatgtttggagcgctttgatgcctatggtggaaaacgaaatatccgcacataaaatctagacagcagcattctcagaaacttgtttgtgttgtgtgcattcaactcacagagttgaacctttcctttgattgagcagttttgaaaaagtctttttgtagaatccacaagtggatatttggagcagtttgaggcctatggtgtaaaaggaaatatcttcacataaaaactagacagaagcattctcagaaacttctttgtgttgtgtgcattcaactcacagagttgaacttttcctatgattgagcagttttgaaacactctttctgaagaatctgcaagtggatatttggagcgctttgaggcctatggtggaaaaggaaacaccttcacaaaaaaactagagcagaagcattctcagaaacgtctttgtgatgtgtgcattcaactcacagagttgaacctttctttgatagagcagttttcacacactctttttgtagaatctgcagttggatatttggagcgctttgatgcctatggtggaaaaggaaatatccgcacataaaaactagacagcagcattctcagaaacttgtttgtgttgtgtgcattcaactcacagagttgagctttcctttgattgagcagttttgaaaaagtctttttgcagaatctgcaagtggatatttggagcggtttgaggcctatggtgtaaaaggaaatatcttcacataaaaactagacagaagcattctctgaaacttctttgtgatgtgtgaattcaactcacagagttgaacctttcttttgtagagcagttttgaaactctttttgtagaatctgtaagtagatatttggagcgctttgaggcttatggtggaaaaggaaatatcttcacataaaaactagacagaagcattctcagaaacttctttgtgataagtgcattcaactcacagagtcgaacctttctgttgatagagcagttttaaatcactctttttctagaatctgaaagtggatatttggagtgctctgaggcctatggtggaaaaggaaatacctacacataaaaactaggcggaagcattctcagaaatatctttgtgatgagtgcattcaactcacagagttgaacatttatgttgatagaggagttttaaaacactctttttcaggaatctgaaagtggatatttgcagcgctttgaggcctctggtggaaaaggaaacaccttcacaaaaaaaactagagcagaagcattctcaggaacttctttgtgatgtgtccattcaactcacagagttgaaccttttttttggatagagcagttttgaaacactatttttgtacaatctgcggtggatattggagcgcttgaactagcggagcattctcagaatatctttgtgatgagtgcattgaactcacagagttgaacatttatgttgatagaggagttttaaaacactcttttcaggaatctgaaagtggatatttggagcgctttgaggactttggtggaaaaggaaacaccttcacaaaaaaaactagagcagaagcattctcagaacttctttgtgatgtgtgcattcaactcacagagttgaacctttttttttgatagagcagttttgaaacactatttttgtacaatctgcggttggatatttggagcgctttgatgcctatggtggaaaacgaaatatccgcacataaaatctagacagcagcattctcagaaacttctttgtgttgtgtgcattcaactcacagagttgaacctttcctttgattgagcagttttgaaaaagtctttttgtagaatccacaagtggatatttggagcagtttgaggcctatggtgtaaaaggaaatatcttcacataaaaactagacagaagcattctcagaaacttctttgtgttgtgtgcattcaactcacagagttgaacttttcctatgattgagcagttttgaaacactctttctgaagaatctgcaagtggatatttggagcgctttgaggcctatggtggaaaaggaaacaccttcacaaaaaaactagagcagaagcattctcagaaacgtctttgtgatgtgtgcattcaactcacagagttgaacctttctttgatagagcagttttaaatcactctttttctataatctgaatgtggatatttggagtgctctgaggcctatggtggaaaaggaaatacctacacataaaaactaggcggaagcattctcagaaatatctttgtgatgagtgcattcaactcacagagttgaacatttatgttgatagaggagttttaaaacactctttttcaggaatctgaaagtggatatttggagcgctttgaggcctatggtggaaaaggaaacaccttcacaaaaaaaactagagcagaagcattctcaggaacttctttgtgatgtgtgcattcaactcacagagttgaacctttttttttggatagagcagttttgaaacactatttttgtacaatctgcggttggatatttggagcgctttgatgcctatggtggaaaacgaaatatccgcacataaaatctagacagcagcattctcagaaacttgtttgtgttgtgtgcattcaactcacagagttgaacctttcctttgattgagcagttttgaaaaagtctttttgtagaatccacaagtggatatttggagcagtttgaggcctatggtgtaaaaggaaatatcttcacataaaaactagacagaagcattctcagaaacttctttgtgttgtgtgcattcaactcacagagttgaacttttcctatgattgagcagttttgaaacactctttctgaagaatctgcaagtggatatttggagcgctttgaggcctatggtggaaaaggaaacaccttcacaaaaaaactagagcagaagcattctcagaaacgtctttgtgatgtgtgcattcaactcacagagttgaacctttctttgatagagcagttttgaaacactctttttgtagaatctgcagttggatatttggagcgctttgatgcctatggtggaaaaggaaatatccgcacataaaaactagacagcagcattctcagaaacttgtttgtgttgtgtgcattcaactcacagagttgagctttcctttgattgagcagttttgaaaaagtctttttgcagaatctgcaagtggatatttggagcggtttgaggcctatggtgtaaaaggaaatatcttcacataaaaactagacagaagcattctctgaaacttctttgtgatgtgtgaattcaactcacagagttgaacctttcttttgtagagcagttttgaaactctttttgtagaatctgtaagtagatatttggagcgctttgaggcttatggtggaaaaggaaatatcttcacataaaaactagacagaagcattctcagaaacttctttgtgataagtgcattcaactcacagagtcgaacctttctgttgatagagcagttttaaatcactctttttctagaatctgaaagtggatatttggagtgctctgaggcctatggtggaaaaggaaatacctacacataaaaactaggcggaagcattctcagaaatatctttgtgatgagtgcattcaactcacagagttgaacatttatgttgatagaggagttttaaaacactctttttcaggaatctgaaagtggatatttggagcgctttgaggcctatggtggaaaaggaaacaccttcacaaaaaaaactagagcagaagcattctcaggaacttctttgtgatgtgtgcattgaactcacagagttgaacctttttttttgatagagcagttttgaaacactatttttgtacaatctgcggttagatatttggagcgctttgatgcctatggtggaaaacgaaatatccgcacataaaatctagacagcagcattctcagaaacttgtttgtgttgtgtgcattcaactcacagagttcaacctttcctttgattgagcagttttgaaaaagtctttttgtagaatccacaagtggatatttggagcagtttgaggcctatggtgtaaaaggaaatatcttcacataaaaaccagacagaagcattctcagaaacttctttgtgttgtgtgcattcaactcgcagagttgaacttttcctatgattgagcagttttgaaacactctttctgaagattctgcaagtggatatttggagcgctttgaggcctatggtggaaaaggaaacaccttcacaaaaaaactagagcagaagcattctcagaaacgtctttgtgatgtgtgcattcaactcacagagttgaacctttctttgatagagcagttttgaaacactctttttgtagaatctgcagttggatatttggagcgctttgatgcctatggtggaaaaggaaatatccgcacataaaaactaggcagcagcattctcagaaacttgtttgtgttgtgtgcattcaactcacagagttgacctttcctttgattgagcagttttgaaaaagtctttttgcagaatctgcaagtggatatttggagcggtttgaggcctatggtgtaaaaggaaatatcttcacataaaaactagacagaagcattctctgaaacttctttgtgatgtgtgaattcaactcacagagttgaacctttcttttgtaaagcagttttgaaactctttttgtagaatctgtaagtagatatttggagcgctttgaggcttatggtggacgagggaataacttcacataaaactagacagaagcattctcagaaacttctttgtgataagtgcattcaactcacagagtcgaacctttctgttgatagagcagttttaaatcactctttttctagaatctgaaagtggatatttggagtgctctgaggcctatggtggaaaaggaaatacctacacataaaaactaggcggaagcattctcagaaatatctttgtgatgagtgcattcaactcacagagttgaacatatatgttgatagaggagttttaaaacactctttttcaggaatctgaaagtggatatttggagcgctttgaggcctatggtggaaaaggaaacaccttcacaaagaaaactagagcagaagcattctcaggaacttctttgtgatgtgtgcattcaactcacagagttgaatctttttttttgatagagcagttttgaaacactatttttgtacaatctgcagttggatatttggagcgctttgatgtctatggtggaaaacgaaatatccgcacataaaatctagacagcagcattctcagaaacttgtttgtgttgtgtgcattcaactcacagagttgaacctttcctttgattgagcagttttgaaaaagtctttttgtagaatccacaagtggatatttggagcagtttgaggcctatggtgtaaaaggaaatatcttcacataaaaaccagacagaagcattctcagaaacttctttgtgttgtgtgcattcaactcgcagagttgaacttttcctatgattgagcagttttgaaacactctttctgaagattctgcaagtggatatttggagcgctttgaggcctatggtggaaaaggaaacaccttcacaaaaaaactagagcagaagcattctcagaaacgtctttgtgatgtgtgcattcaactcacagagttgaacctttctttgatagagcagttttgaaacactctttttgtagaatctgcagttggatatttggagcgctttgatgcctatggtggaaaaggaaatatccgcacataaaaactagacagcagcattctcagaaacttgtttgtgttgtgtgcattcaactcacagagttgacctttcctttgattgagcagttttgaaaaagtctttttgcagaatctgcaagtggatatttggagcggtttgaggcctatggtgtaaaaggaaatatcttcacataaaaactagacagaagcattctctgaaacttctttgtgatgtgcgaattcaactcacagagttgaacctttcttttgtaaagcagttttgaaactctttttgtagaatctgtaagtagatatttggagcgctttgaggcttatggtggaaaaggaaatatcttcacataaaaactagacagaagcattctcagaaacttctttgtgataagtgcattcaactcacagagtcgaacctttctgttgatagagcagttttaaatcactctttttctagaatctgaaagtggatatttggagtgctctgaggcctatggtggaaaaggaaatacctacacataaaaactaggcggaagcattctcagaaatatctttgtgatgagtgcattcaactcacagagttgaatatttatgttgatagaggagttttaaaacactctttttcagaaatctgaaagtggatatttggagcgctttgaggcctatggtggaaaaggaaacaccttcacaaaaaaaactagagcagaagcattctcagaaacttctttgtgctgtgtgcattcaactcacagagttgaaactttttttttgatagagcagttttgaaacactatttttgtacaatctgcggttggatgtttggagcgctttgatgcctatggtggaaaacgaaatatccgcacataaaatctggacagcagcactctcagaaacttgtttgtgttgtgtgcattcaactcacagagttgaacctttcctttgattgagcagttttgaaaaagactttttgtagaatccacaagtggatatttggagcagtttgaggcctatggtgtaaaaggaaatatcttcacataaaaaccagacagaagcattctcagaaacttctttgtgttgtgtgcattcaactcgcagagttgaacttttcctatgattgagcagttttgaaacactctttctgaagattctgcaagtggatatttggagcgctttgaggcctatggtgataaggaaacaccttcacaaaaaactagagcagaagcattctcagaaacgtctttgtgatgtgtgcattcaactcacagagttgaacctttctttgatagagcagttttgaaacactctttttgtagaatctgcagttggatatttggagcgctttgatgcctatggtggaaaaggaaatatccgcacataaaaactaggcagcagcattctcagaaacttgtttgtgttgtgtgcattcaactcacagagttgacctttcctttgattgagcagttttgaaaaagtctttttgcagaatctgcaagtggatatttggagcggtttgaggcctatggtgtaaaaggaaataacttcacataaaaactagacagaagcattctctgaaacttctttgtgatgtgtgaattcaactcacagagttgaacctttcttttgtaaagcagttttgaaactctttttgtagaatctgtaagtagatatttggagcgctttgaggcttatggtggaaaaggaaataacttcacataaaaactagacagaagcattctcagaaacttctttgtggtaagtgcattcaactcacagagtcgaacctttctgttgatagagcagttttaaatcactctttttctagaatctgaaagtggatatttggagtgctctgaggcctatggtggaaaaggaaatacctacacataaaaactaggcggaagcattctcagaaatatctttgtgatgagtgcattcaactcacagagttgaatatttatgttgatagaggagttttaaaacactctttttcagaaatctgaaagtggatatttggagcgctttgaggcctatggtggaaaaggaaacaccttcacaaaaaaaactagagcagaagcattctcagaaacttctttgtgctgtgtgcattcaactcacagagttgaacctttttttttgatagagcagttttgaaacactatttttgtacaatctgcggttggatgtttggagcgctttgatgcctatggtggaaaacgaaatatccgcacataaaatctagacagcagcactctcagaaacttgtttgtgttgtgtgcattcaactcacagagttgaacctttcctttgattgagcagttttgaaaaagtctttttgtagaatccacaagtggatatttggagcagtttgaggcctatggtgtaaaaggaaatatcttcacataaaaaccagacagaagcattctcagaaacttctttgtgttgtgtgcattcaactcgcagagttgaacttttcctatgattgagcagttttgaaacactctttctgaagattctgcaagtggatatttggagcgctttgaggcctatggtggaaaaggaaacaccttcacaaaaaaactagagcagaagcattctcagaaacgtctttgtgatgtgtgcattcaactcacagagttgaacctttctttgatagagcagttttgaaacactctttttgtagaatctgcagttggatatttggagcgctttgatgcctatggtggaaaaggaaatatccgcacataaaaactaggcaacagcattctcagaaacttgtttgtgttgtgtgcattcaactcacagagttgacctttcctttgattgagcagttttgaaaaagtctttttgcagaatctgcaagtggatatttggagcggtttgaggcctatggtgtaaaaggaaatatcttcacataaaaactagacagaagcattctctgaaacttctttgtgatgtgtgaattcaactcacagagttgaacctttcttttgtagagcagttttgaaactctttttgtagaatctgtaagtagatatttggagcgctttgaggcttatggtggaaaaggaaatatcttcacataaaaactagacagaagcattctcagaaacttctttgtgataagtgcattcaactcacagagtcgaacctttctgttgatagagcagttttaaatcactctttttctagaatctgaaagtggatatttggagtgctctgaggcctatggtggaaaaggaaatacctacacataaaaactaggcggaagcattctcagaaatatctttgtgatgagtgcattcaactcacagagttgaacatatatgttgatagaggagttttaaaacactctttttcaggaatctgaaagtggatatttggagcgctttgaggcctatggggaaaaggaaacaccttggagtcttgctctgtacccaggtgggagtgcagtgttgtgatcttggctcactgcaacctcttcctcctgggttcaagtgattctcctacctcagcctcccgagtagctggaattacaggtgcccataaccatgcccagctaatttttgtatttttccatagagacggggtttcaccatgttagccaggctggtcttgaactccactatttttgtacaatctgcggttggatgtttggagcgctttgatgcctatggtggaaaacgaaatctccgcacataaaatctagacagcagcattctcagaaacttgtttgtgttgtgtgcattcaactcacagagttgaacctttcctttgattgagcagttttgaaaaagtctttttatagaatccacaagtggatatttggagcagtttgaggcctatggtgtaagaggaaatattttcacataaaaactagacagaagcattctcagaaacttctttgtgttgtgtgcattcaactcacagagttgaacttttcctatgattgagcagttttgaaacactctttctgaagaatctgcaagtggatatttggagtgctttgaggcctatggtggaaaaggaaacaccttcacaaaaaaactagagcagaagcattctcagaatcttctttgtgatgtgtgcattcaactcacagagttgaacctttttttttgatagagcagttttgaaacactatttttgtacaatctgcggttggatatttggagcgctttgatgcctatggtggaaaacgaaatatccgcacataaaatctagacagcagcattctcagaaacttgtttgtgttgtgtgcattcaactcacagagttgaacctttcctttcattgagcagctttgaaaaagtctttttgtagaatccacaagtggatatttggagcagtttgaggcctatggtgtaaaaggaaatatcttcacataaaaaccagacagaagcattctcagaaacttctttgtgttgtgtgcattcaactcacagagttgaacttttcctatgattgagcagttttgaaacactctttctgaagaatctgcaagtggatatttggagcgctttgaggcctatggtggaaaaggaaacaccttcacaaaaaaactagagcagaagcattctcagaatcttctttgtgatgtgtgcattcaactcacagagttgaacctttttttttgatagagcagttttgaaacactatttttgtacaatctgcggttggatatttgcagcgctttgatgcctatggtggaaaacgaaatatccgcacataaaatctagacagcagcattctcagaaacttgtttgtgttgtgtgcattcaactcacagagttgaacctttcctttgattgagcagttttgaaaaagtctttttgtagaatccgcaagtggatatttggagcggtttgaggcctatggtgtaaaaggaaatatcttcacataaaaaccagacagaagcattctcagaaacttctttgtgatgtgtgcattcaactcacagagttgaacctttcttttgtaaagcagttttgaaactctttttgtagaatctgtaagtagatatttggagcgctttgagtcttatggtggaaaaggaaatatcttcacataaaaactagacagaagcattctctgaaacttctttgtgatgtgtgaattcaactcacagagttgaacctttcttttgcagagcagttttgaaactcctttgtagaatctgtaagtagatatttggagcgctttgaggcttatggtggaaaaggaaatatcttcacataaaaactagacagaagcattctcagaaacttctttgtgataagtgcattcaactcacagagtcgaacctttctgttgatagagcagttttaaatcactctttttctagaatctgaaagtggatatttggagtgctctgaggcctatggtggaaaaggaaatacctacacataaaaactaggcggaagcattctcagaaatatctttgtgatgagtgcattcaactcacagagttgaacatatatgttgatagaggagttttaaaacactctttttcaggaatctgaaagtggatatttggagcgctttgaggcctatggtggaaaaggaaacacctactcaaagaaaactagagcagaagcattctcaggaacttctttgtgatgtgtgcattcaactcacagagttgaacctttttttttgatagagcagttttgaaacactatttttgtacaatctgcggttggatgtttggagcgctttgatgcctatggtggaaaacgaaatatccgcacataaaatctagacagcagcattctcagaaacttgtttgtgttgtgtgcattcaagtcacagagttgaacctttcctttgattgagcagttttgaaaaagtctttttgtagaatccacaagtggatatttggagcagtttgaggcctatggtgtaaaaggaaatatcttcacataaaaactagacagaagcattctcagaaacttctttgtgttgtgtgcattcaactcacagagttgaacttttcctatgattgagcagttttgaaacactctttctgaagaatctgcagtggatatntggagcgctttgaggctatggtggaaaggaacaccttccaaaaaactagagcagagcatctcagaacgtcntgtgatggtgcattcactcacagagtgaccttcttngaagagcagtttgaacactcttttgtagatctgcagtggatattngagcgcttgatgctatgtcgcacataaaaactagacagcgcatctcagaactgtttgtgtgtgtgcatcaactcacagagtgagctttcctttgattgagcagttttgaaaagtctttttgcagaatctgcaagtggatatttggagcggtttgaggcctatggtgtaaaaggaaatatcttcacataaaaactagacagaagcattctctgaaacttctttgtgatgtgtgaattcaactcacagagttgaacctttcttttgtagagcagttttgaaactctttttgtagaatctgtaagtagatatttgtagcgctttgaggcttatggtggaaaaggaaatatcttcacataaaaactagacagaagcattctcagaaacttctttgtgataagtgcattcaactcacagagtcgaacctttctgttgatagagcagttttaaatcactctttttctagaatctgaaagtggatatttggagtgctctgaggcctatggtggaaaaggaaatacctacacataaaaactaggcggaagcattctcagaaatatctttgtgatgagtgcattcaactcacagagttgaacatttatgttgatagaggagttttaaaacactctttttcaggaatctgaaagtggatatttggagcgctttgaggactttggtggaaaaggaaacaccttcacaaaaaaaactagagcagaagcattctcagaagattctttgtgatgtgtgcattcaactcacagagttgaaacttttttttggatagagcagttttgaaacactatttttgtacaatctgcggttggatatttggagcgctttgatgcctatggtggaaaacgaaatatccgcacataaaatctagacagcagcattctcagaaacttgtttgtgttgtgtgaattcaactcacagagttgaacctttcctttgattgagcagttttgaaaaagtctttttgtagaatccacaagtggatatttggagcagtttgaggcctctggtgtaaaaggaaatatcttcacatgaaaactagacagaagcattctcagaaacttctttgtgttgtgtgcattcaactcacagagttgaacttttcctatgattgagcagttttgaaacactctttctgaagaatctgcaagtggatatttggagcgctttgaggcctatggtggaaaaggaaacaccttcacaaaaaaactagagcagaagcattctcagaaacgtctttgtgatgtgtgcattcaactcacagagttgaacctttctttgatagagcagttttgaaacactctttttgtagaatctgcagttggatatttggagcgctttgatgcctatggtggaaaaggaaatatccgcacataaaaactagacagcagcattctcagaaacttgtttgtgttgtgtgcattcaactcacagagttgagctttcctttgattgagcagttttgaaaaagtctttttgcagaatctgcaagtggatatttggagcggtttgaggcctatggtgtaaaaggaaatatcttcacataaaaactagacagaagcattctctgaaacttctttgtgatgtgtgaattcaactcacagagttgaacctttcttttgtagagcagttttgaaactctttttgtagaatctgtaagtagatatttggagcgctttgaggcttatggtggaaaaggaaatatcttcacataaaaactagacagaagcattctcagaaacttctttgtgataagtgcattcaactcacagagtcgaacctttctgttgatagagcagttttaaatcactctttttctagaatctgaaagtggatatttggagtgctctgaggcctatggtggaaaaggaaatacctacacataaaaactaggcggaagcattctcagaaatatctttgtgatgagtgcattcaactcacagagttgaacatttatgttgatagaggagttttaaaacactctttttcaggaatctgaaggggatatttggagcgctttgaggcctatggtggaaaaggaaacaccttcacaaaaaaaactagagcagaagcattctcaggaacttctttgtgatgtgtgcattcaactcacagagttgaacctttttttttgatagagcagttttgaaacactatttttgtacaatctgcagttggatgtttggagcgctttgatgcctatggtggaaaacgaaatatccgcacataaaatctagacagcagcattctcagaaacttgtttgtgttgtgtgcattcaactcacagagttgaacctttcctttgattgagcagttttgaaaaagactttttgtagaatccacaagtggatatttggagcagtttgaggcctatggtgtaaaaggaaatatcttcacataaaaactagacagaagcattctcagaaacttctttgtgttgtgtgcattcaactcacagagttgaacttttcctatgattgagcagttttgaaacactctttctgaagaatctgcaagtggatatttggagcgctttgaggcctatggtggaaaaggaaacaccttcacaaaaaaactagagcagaagcattctcagaaacgtctttgtgatgtctgaattcaactcacatagttgaacctttctttgatagagcagttttgaaacactctttttgtagaatctgcagttggatatttggagcgctttgatgcctatggtggaaaaggaaatatcctcacataaaaactagacagcagcaatctcagaaacttgtttgtgttgtgtgcattcaactcacagagttgacctttcctttgattgagcagttttgaaaaagtctttttgcagaatctgcaagtggatatttggagcggtttgaggcctatggtgtaaaaggaaatatcttcacataaaaactagacagaagcattctctgaaacttctttgtgatgtgtgaattcaactcacagagttgaacctttcttttgtagagcagttttgaaactctttttgtagaatctgtaagtagatatttggagcgctttgaggcttatggtggaaaaggaaatatcttcacataaaaactagacagaagcattctcagaaacttctttgtgataagtgcattcaactcacagagtcgaacctttctgttgatagagcagttttaaatcactctttttctagaatctgaaagtggatatttggagtgctctgaggcctatggtggaaaaggaaatacctacacataaaaactaggcggaagcattctcagaaatatctttgtgatgagtgcattcaactcacagagttgaacatttatgttgatagaggagttttaaaacactctttttcaggaatctgaaagtggatatttggagcgctttgaggcctatggtggaaaaggaaacaccttcacaaaaaaaactagagcagaagcattctcaggaacttctttgtgatgtgtgcattcaactcacagagttgaacttttttttggatagagcagttttgaaacactatttttgtacaatctgcggttggatatttggagcgctttgatgcctatggtggaaaacgaaatatccgcacataaaatctagacagcagcattctcagaaacttgtttgtgttgtgtgcattcaactcacagagttgaacctttcctttgattgagcagttttgaaaaagtctttttgtagaatccacaagtggatatttggagcagtttgaggcctatggtgtaaaaggaaatatcttcacataaaaactagacagaagcattctcagaaacttctttgtgttgtgtgcattcaactcacagagttgaacttttcctatgattgagcagttttgaaacactctttctgaagaatctgcaagtggatatttggagcgctttgaggcctatggtggaaaaggaaacaccttcacaaaaaaactagagcagaagcattctcagaaacgtctttgtgatgtgtgcattcaactcacagagttgaacctttctttgatagagcagttttgaaacactctttttgtagaatctgcagttggatatttcgagcgctttgatgcctatggtggaaaaggaaatatccgcacataaaaactagacagcagcattctcagaaacttgtttgtgttgtgtgcattcaactcacagagttgacctttcctttgattgagcagttttgaaaaagtctttttgcagaatctgcaagtggatatttggagcggtttgaggcctatggtgtaaaaggaaatatcttcacataaaaactgacagaagcatctctgaactcttngtgatggtgattcactccagagtgactcacagagtgactttcttngatgagcagtttgaaaagtcttttgcagaactgcagtggatattggagcgttgaggcctatggtgtaaaaggaaatatcttcacataaaaactagacagaagcattctctgaaacttctttgtgatgtgtgaattcaactcacagagttgaacctttcttttgtagagcagttttgaaactctttttgtagaatctgtaagtagatatttggagcgctttgaggcttatggtggaaaaggaaatatcttcacataaaaactagacagaagcattctcagaaacttctttgtgataagtgcattcaactcacagagtcgaacctttctgttgatagagcagttttaaatcactctttttctagaatctgaaagtggatatttggagtgctctgaggcctatggtggaaaaggaaatacctacacataaaaactaggcggaagcattctcagaaatatctttgtgatgagtgcattcaactcacagagttgaacatttatgttgatagaggagttttaaaacactctttttcaggaatctgaaagtggatatttggagcgctttgaggcctatagtggaaaaggaaacaccttcacaaaaaaaactagagcagaagcattctcaggaacttctttgtgatgtgtgcattcaactcacagagttgaagctttttttttgatagagcagttttgaaacactatttttgtacaatctgcggttggatatttggagcgctttgatgcctatggtggaaaacgaaatatccgcacataaaatctagacagcagcattctcagaaacttgtttgtgttgtgtgcattcaactcacagagttgaacctttcctttgattgagcagtttcgaaaaagtctttttgtagaatccacaagtggatatttggagcagtttgaggcctatggtgtaaaaggaaatatcttcacataaaaaccagacagaagcattctcagaaacttctttgtgttgtgtgcattcaactcacagagttgaacttttcctatgattgagcagttttgaaacactctttctgaagaatctgcaagtggatatttggagcgctttgaggcctatggtggaaaaggaaacaccttcacaaaaaaactagagcagaagcattctcagaaacgtctttgtgatgtgtgcattcaactcacagagttgaacctttctttgatagagcagttttgaaacactctttttgtagaatctgcagttggatatttggagcgctttgatgcctatggtggaaaaggaaatatccgcacataaaaactagacagcagcattctcagaaacttgtttgtgttgtgtgcattcaactcacagagttgagctttcctttgattgagcagttttgaaaaagtctttttgcagaatctgcaagtggatatttggagcggtttgaggcctatggtgtaaaaggaaatatcttcacataaaaactagacagaagcattctctgaaacttctttgtgatgtgtgaattcaactcatagagttgaacctttcttttgtagagcagttttgaaactctttttgtagaatctgtaagtagatatttggagcgctttgaggcttatggtggaaaaggaaatatcttcacataaaaactagacagaagcattctcagaaacttctttgtgataagtgcattcaactcacagagtcgaacctttctgttgatagagcagttttaaatcactctttttctagaatctgaaagtggatatttggagtgctctgaggcctatggtggaaaaggaaatacctacacataaaaactaggcggaagcattctcagaactatctttgtgatgagtgcattcaactcacagagttgaacatttatgttgatagaggagttttgaaacactctttttcaggaatctgaaagtggatatttggagcgctttgaggcctatggtggaaaaggaaacaccttcacaaaaaaaactagagcagaagcattctcagaaacttctttgtgatgtgtgcattcaactcacagatttgaaccttttttttgatagagcagttttgaaacactatttttgtacaatctgcagttggatatttggagggctttgatgcctatggtggaaaacgaaatatccgcacataaaatctagacagcagcattctcagaaacttgtttgtgttgtgtgcattcaactcacagagttgaacctttcctttgattgagcagttttgagaaagtctttttgtataatccacaagtggatatttggagcagtttgaggcctatggtgtaaaaggaaatatcttcacataaaaactatacagaagcattctcagaaacttctttgtgatgtgtgaaatcaactcacagagttgaacctttctttcgtagagcagttttgaaacactctttttgtagaatctgcaagtagatatttggagcgctttgaggcttatggtggaaaaggaaatatcttcacataaaaactagaaagaagcattctcagaaacttctttgtgatgtgtgcattcaactcacagatttgaacctttctgttgatagagcagttttaaaacactctttttctggaatctgaaagtggatatttggagcgctttgaggcctatagtggaaaaggaaacacctttacaaaaaaactatagcagaagaattctcagaaacttctttgtgatgtgtgcattcaactctttgagttttttgatagagcagttttgaaacactatttttgtagaatctgcaattggatatttggagggctttgatgcctacggtggaaaaggaaatatccacacataaaaactagacacagcatgctcagaaacttgtttgtgttgtgtgcattcaactcacagagttgacctttcctttgattgagcagttttgaaaaagtctttttgtagaatctgcaagtggacatttggagcggtttaaggcctatggtgtaaaaggaaatatcttcacataaagactagacagaagtattctcagaaagttctttgcgatgtgtgaattcaactcacagagttgaacctttctttcatagagcagttttgaaacactctttttatagaatctgcaagtagatatttggagcgctttgaggcttatagtagaaaaggaaatatcttcacataaaaactagacagaagcattctcagaaacttctttgtgataagtgcattcaacccacagagttgagcctttcttttgatagagcagttttaaaacactctttttctagaatctgaaattggatatttggagcgcttttaggcctatggaggaaaaggaaatatcttcacataaaaactagatggaagcattctcagaaacttctttgtgataagtgcattcaactcacagagttgagcctttcttttgatagagcagttttaaaacactctttttctagaatctgaaagtggatatttggagtgctttgaggcctatggtggaaaaggaaatatcttcacatagaaactaggcagatgcattgtcagtaactaatttgtgttgtgtgcattcaactcacagagttgtatttttcctttgattgagcagttttgaaacactctttttgtagaatctgcaagtggatatttggagcactttgaggcctatggtggaaaaggaaacaccttcacaaaaagactggagcagaagcattcttagaaactcctttgtgatgtgtgcattcaactcacactgttcaaactttctttagatagatcagttttgaaacacactttttgtagaatctgcaagtggatatttgcagcgctttgaggcctatggtggaaaaacaaatatcctcatataaaaactcgacagaagcattctcagagacttgtttgtgttgtgtaaattcaacgcacggagttgaaccattcctttgattgagcagttttgaaacactctttttgtagaatctgccagtggatatttgaagcgctttgatgcctatggtgtaataggaactatcttcacataaaaactagacagaagcattctcagaatctttcttgtaatgtgtgcattcaactcgcagtgttaaacctttgttttgaatagcagttttgaaacactttttttttagaatatgcaagtggatatttggatcgctttgtggcctatggaggaaaacaaaatatcttcacataaaaagttgacagaaacattctcagaaactactttgtgatgagtgcattctattcaaaaagttgaaagtttctttttatggagcaattttgaaacactcttttcgtagattctgaaaatggattctggagcgatttgaggcctatgttggaaaagtaaatatcctcacattaaaacttgactgaagcattctcagaaacatctttgtgttgtgtgcattcaactcaccgagttgaatatttcgtttgattgagcagttttgaaacactatttttgtagtatctgcaagtggatatttggagggtttgaggcctttggcggaaaaggaaatatcttcacataaaaactggacagatgcattctcagaaacttcttggtgatgagtccattcacctcagagagttgaaccttccttatgatagagcagttttaaaacactctttttatagaatctgcaagtgcatatttggagcgctttgaggcctatggtggtaaaggaaatatcttcacataaaaactagagaaaagcattctccgaaacttctttgtgatgagtgaattcaactcacagagctgaacctttctcttgatagagcagttttgaaacactctttttgtaggatctgcaagtggatatttggagtgctctgaggcctatggtggaaaaggaaatatcatcaaatgaaaactagacagaagcattctcagaaacttctttgtgttgtgtgtattcaactcacagagttgaaattttcctttgattgagcagttttgaaacactccttttgtagaatctgcaagtgaatatttggagtgctttgaggcctatggtggaaagggaaacaccttcatataaaaactagatcagaaacattctcagaaacttatttctgatgtgttcattcatctcacaaagttgaacctttgttttgttagagcagttttgaaactctctttttgtggaatctgcaactggatatttggagagctttgaggtctatggtgggaaaggaaatatcctcacataaaaattagacagaagcattcccagaaacttctttcgatgagtgcgttctactcacagtgttgaacatttctttgaaatacgagttttgaaacactctttttgtagaaactgaaagtggatatttttagcgttttgaggcctatggtggaaaaggaaatatcttcactgaaacactctttttctagaatctgaacgtggatatttggagcgttttgaggcctatagtggaaaaggaaatattttcacattaaaactcaacagaagcattctcagaaacttatttgtgatgtatgcattgaactcacagaggtgaactttttttttttttttttgatagaacagtttcgcgacaccctttttctagaatctgaatgtggatatttggagtgctttgaggcctatggtggaaaaggaaatatcctcacataaaaactagacaggagcattctcagaaacttttttgtactgtgtgcattcaactcacagagttgaaattttctgttgatagagtagttttgaaacactctttttttaatttttatttatttattattattgtactttaagttttaggatacatgtgcacaatgtgcaggttagttgcatatgtatacatgtgccatgctggtgcgctgcacccactaactcgtcatctaacattaggtatatctcccaatgctatccctcccccctccccacaacccacaacaggccccagtgtgtgatgttccccttcctgtgtccatgtgttatcattgttcaattcccacctatgagtgagaatatgtggtgtttggctttttgttcttgcgatagtttactgagaatgatgatttccagtttcatccatatccctacaaagtacgtgaactcatcattttttatggctgcatagtattccatggtgtatatgtgccacattttcttaatccagtctatcattgttggacatttgggttggttccaaatctttgctattgtgaataatgccgcaaaaaacatacatgtgcgtgtgtctttatagcagcatgatttatattcctttgggtatatacccagtaatgggatggctgggtcaaatggtatttctagttctagatccctgaggaattgccacactgacttccacaattgttgaactagtttacagtcccaccaacagtgtaaaagtgttcctatttctccacatcctctccagcacctgttgtttcctgactttttaatgattgccattctaactggtgtgacatggtatctcattgtggttttcatttgcatttctctgatggcccgtgatggtgagcattttttcatctgttttttggctgcttaaatgtcttcttttgagaagtgtctgttcatgtccttcgcccactttttgatggggttgtttgtttttttcttgtaaatttgtttgagttcattgtagattctggatatcagccctttgtcagatgagtaggttgtgaaaattttctcccattttgtaggttgcctgttcactctgatggtagtttcctttgctgtgcacaagctctttagtttaattagatcccatttgtcaattttgtcttttgttgccattgcttttggtgttttagacatgaagtccttgcccatgcctatgtcctgcatggtaatgcctaggttttcttctagggtttttatggttttagttataacatttaagtctttaatccatcttgaattgacttttgtataaggtgtaaggaagggatccagtttcagctttctacatatggccagctagtttctccagcagcatttattaaatagggaatcctttccccattgcttgtttttctcaggtttgtccaaaatcagatagttagagataagtggcattatttctgagggctctgttctgttccattgatctatatctctgttttggtaccagtaccatgctgatttggttactgtagccttgtagtatagtttgaagtcaggtagtgtgacgcctccagctttgttcttttggcttaggattgacttggcaatgagggctcttttttggttccctgtgaactttaaagtagttttttccaattctgtgaagaaagtgattggtagcttgatggggatggcattgaatctgtaaattactttgggctgtatggccattttcatgatattgattcttcctatccatgagcatggaatgttcttccatttgtttgtatcctcttttatttccttgagcagaggtttgtagttctctttgaagaggtccttcgcatctcttgtaagttggattcctaggtattttattctctttgaagcaattgtgaatgagagttcactcatgatttggctctctgtttgtctgttattggtgtataagaatgcttgtgattattgtacattgattttgtaccctgagatttgctgaagttgcttatcagcttaaggagattttgggctgaaacaatggggttttctagatatacaatcatgtcgtctgcaaacagggacaatttgacttccttttttcctaattgaatacgctttatttccttctcctgcctaattgccctggccagagcttccaacactatgttgaataggagtggtgagagagtgcatccctgtcttgtgccagttttcaaagggaatgcttccagtttttgcccattcagtatgatattggctgtgggtttgttatagatagctcttattattttgaaatacggcccatcaatacctaatttattgagagtttttagcgtgaagtgttgttgaattttgtcaaaggccttttctgcatctattgagataatcatgtggttttgacctttggttctgtttatatgctggattacatttattgatttgcctatatggaaccagccttgcatcccatggatgaagcccattgatcatggtggataagctttttgatgtgctgctgcattcagtttgccagtattttattgaggatttttgcctcaatgttcatcaatgatattggtctaaatttctcttttttggttgtgtctctgcccggctttggtatcaggatgatgctggccacataaaatgagttagggaggattctctctttttctattgattggaatagattcagaaagaatggtaccagttcctccttgtacctctggtagaattcggctgtgaatccatctggtcatggactctttttggttgataagctattgattattgccacaatttcagatcttgttattggtctattcagagattcaaattctttttggttttgtcttgggagagtgtatgtgttgaggaatttatccatttcttctagattttatagtttatttgcatagaagtgtttgtagtattctctgatggtagtttgtatttctgtgggattggtggtgatatcccctttatcattttttattgcatctatttgattcttctctctttttttctttattagtcttgctagtggtctatcaattttgttgatcttttaaaaaaacagctcctggattcattaattttttgaagggttttttgtgtctctatttccttccgttctgctctgattttagttatttcttgccttctgctagcttttgaatgtgttttctcttgcttttctagttcttttagttgtgatgttagggtgtcaattttggatctttcccactttctcttgtgggcatttagtgctataaatttccctctacacactgctttgaatgcatcccagagattctggtatgttgtgtctttgttctcatttgtttcaaagaacatctttatttctgccttcatttcattatgtacccagtagtcattcaggagctggttgttcagtttccatgtagtagagcggttttgagtgagattcttaatcctgagttctagtttgattgcactgtggtctgagagatagtttgttataatttctgttcttttacatttgctgaggagagctttacttccaactctgtggtcaattttggaataagtgtggtgtggtgctgaaaaaatgtatattctgttgataaggggtaaagagttctgtagatgtctattaggtccgcttggtgcagagctgagttcaattcctgggtatccttgttgactttctgtctcgatctgtctaatgttgacagtggggtgttaaaatctcccattaataatgtgtgggagtcaacgtctctttgtaggtcactcaggacttgctttatgaatctgggtgctcctgtattgggtgcatatatatttaggatagttagctcttcttgttgaattgatccctttaccattatgtaatggccttctttgtctcttttgatctttgttagtttaaggtctgttttatcagactaggattgcaacctctgccttttttgttttccatttgcttggtagatcttcctccatccatttattttgagcctatgtgtgtctctgcacatgagatgggtttcctgaatacagcacactgatgagtcttgactctttctccaatttaccagtctgtgtcttttaattggagcatttagtccatttatatttaaagttaatacagttatgtgtgaatttgaacctgccattatgatgttagctggttattttgctcgttagttgatgcagttttttcctagtctcgatggtctttacattttggcatgattttgcagtggctggtaccagctattcctttccatgtttagtgcttccttcaggagctcttttagggcaggcctggtggtgtcaaaatctctcagcatttgcttgtcagaaaagtattttatttctccttcacatataaacaagacagaagcattctcagaaacttctttgtgatgtttgcattaaactcacagggttgaacataacttttcatagagcagtattgaaaaactcttttcatagaatctgcaagtggatatttggactgctttgaggccttcattggaaacaggaacatcttcacatagaaagaggacacaagcattctcagaaactactttgtgatgtgtgcattcaactcatagagataaacatacctttacatagagctgtattgaaactctcttttcgtagaatctgcaagtggatgtttggactgctttgaggccttcgttggaaatgggaatatcctcacataaaaattagacaggagcattctccgaaacgtctttgtgatgtgtgcatttaactcacagagttgaacctttctttcttttgatagagcagttttgaagccctctttttgtagaatctgcaagtggacattgggaaagcttagaggcctatagtggaaaaggaaatatcttcacataaaaactagacagaagcattctcagaaacttctttgtgacgtttgcattcaactcaaagagttgaacatacctttcgtacagcagttttaaaacattcttttcttagaatctgcaagtggatatttgcacggctttgaggcctttgttggaaacgggaaggtcttcacataaaaactagacagaagcattctcagaaacttctttgtgatgtgtgcgttcaacacacagagttgaaactttttcttgatagagtagttttgaaacactctttttgtagaatctgcaatttgacatttggagagctttgaggcctatggtggaaaacgaaatatctacacataaagactagacagaagcgttctcagtgacttctttgtgatgtttccattcgactcacaaatttgaacataccttttcatagggcagttttgaaacactcttttcatagtatatgcaagtggatatttggactgctttcaggccttcgttggaaacgggaatatcttcacataaaaactagacagaagcattctcagaaacttctttgtgatgtgtgcattcaattcacagaattgaccttaccttttaatagagcagtattggaacactcttttcgtaaaatatgcaagtgtatatttggactgctttgaggccttcgttggaaacgggagtatcttcacataaaaactagacagaagcattctcagaaacttcgttgtgatgtgtgcattcaactcacagagtggaacatagcttttcatagagaagttttgaaacactcttttcgttaatatgaaagtggatatttaaactgctttggggccttcgtttgaaatgggaatatcttcacataaaagttagacaaaaggattctcagaaacttctttgtgatgtgtgcattcaactcacagatttgaacctttcttttcgtagagaagttttgaaacactctcgtcgtagaatctgcaattgaatatttggactgctttgaggccttcgttggaaaagggaatatcttgacataaaaagtaaacagaagcattcccagaaacttctctgtgatgtcggcattcaactcgtagagttcaacataccttttcatagagcagttttgaaacactcttttcatagaatctgcaagtgtatattttgactgctttgaggcctatggtggaaaagtaaatatctacaaagaaaatccagagagaagcattctcagaaactttttgtgatgtttgcattcaactcacagagttgaacttacctgttcatagagcagttacgaaacactcttttcgtagaatctgcaagtggatatttggaatgcttagaggcctactgtggaaaaggaaatatcttcacataaaaacaagacggaagcattcacagtaacttctttgtgatgtgcgcattcaactcacagagttgaacctttattttgatagagcagttttgaaacactctttttgtagaatctgcaagtggacatttggagagctttgagacctttggtggaaaagtaagtatctacacagaaaatccagacagaagcattctcagaaacttctttttgatgtttgcattcaagtcacagagttgaacttactgttcatagagcagttatgaaacactcttctcgtagaatctgcaggtggatatttggattgatttgaggccttcgttggaaatggaaatatcttcacataaaaattagacagaagcattctcagaaactactttgtgatccgtgcattcaactcaaagagttgaacctttcttttgatagagcagttttgaaacactctttttgtagaatctccaagtggacatttggagagctttgaggcatatggtggaaaacaaaatatcttcacataaaaactagacagaagcattctcaaaaacttctctgtaatgtttgcattcaattgaaagagttaaacaaaccttttcataggcagttttgaaacactcttttcatagaatatgcaagtggatatttggactgctttgaggccttcgctggaaatgggaatattctcacataataactagacagaagcattctccgaaacatctttgtggtgtgtgcatttaactcacagaggtgaacctttctttcttttgatagagcagttttgaaacactcttttcgtagtatatgcaagtggatatttggactgctgtgaggccttcgttggaaaagggaatatcttcacataaaaactagacagaagcattctcagaaacttctttgtgatgtgtgcattcaactcacagagttgaacataacttttcatagagcagttttgaaacactcttttcgttaatatgaaagtgggtatttaaactgctttggggccttcgtttgaaatgggaatatcttcacttaaaaattagacaaaaggattctcagaaacttctttgtgatgtgtgcattcaactcacagatttgaacctttcttttcatagagcagttttgaaacactctcgtcgtagaatctgcaattgaatatttggactgctttgaggccttcgttggaaaaggtaatatcttgacataaaaagtaaacagaagcattcccagaaactcctctctgatgtctaaattcaactcatagatttcaacataccttttcatagagcagttttgaaacactcttttcgtagaatctgcaagtatatatttggactgctttgaggtctacggtggaaatgtaaatatctacaaagaaaatccagagagaagcattctcagaaactttttgtgatgtttgcattcaactcacagagttgaactttcctgttcatagagcagttatgaaacactcttctcgtagaatctgcaagtggatatttggaatgctttgaggccttcattggaaccaggaatatcttcacataaaaacaagatggaagtattcacagtaacttctttgtgatgtgtgcattcaactcacagagttgaacctttattttgatagagcagttttgaaacactctttttgtagaatctgcaagtggacatttggagagctttgagacctatggtggagaagtaaatatctacacagaaaatctagacagaagcattctcagaaacttctttttgatgtttgcattcaactcacagagttgaacttactgttcatagagtagttatgaaacactcttctcgtagaatctgcaggtggatatttggactgctttgaggtcttcctttgaaacgggaatgtctttctttaaaaactagacagaagcattctcagaatcttcattgtgatgtgtgcattcaactcacagagttgaaccattcttttgacagagcagttatgaaaaactctttttgtggaatctgcaagtggacatttagagagctttgaggcctatggtggaaaaggaaatagcttcacataacaactagacagcagcattctcagaaacatctttttgatgtttgcattacactcacagaggtgaacataccttttcagagagcagttttgaaacactcttttcgtagaatctgcaagtggatatttggactgctttgaggctttcgatggaaacgggaatatattcacataaaaaccagacaaaagcattctcagaaacttctttgtgctgtttgcattcaactcatggagatgaacatgtcttttcatagagcagttttgaaacactcttttcgtagaatctgcaagtggatatttggactgctttgaggctttcgatggaaacgggaatatattcacataaaaacaagacagaactattctcagaaacttctttgtgatgtgtgcattaaactcacgaatttgaacctttcttttgatagagcaattttgaaactctctttttgtagaatctccaagtggacattggtagagctttgaggcctttggtggaaaaggaaatatcttcacataaaaactagacagaagcattctcaaaaacttctctgtaatgtttgcattcaattgaaagagttgaacaaaccttttcatagagcagttttgaaacactcttttcataaaatatgcaagtggatatttggactgctttgaggccttcgttggaaacgggaatatcttcacataaaaactagacagaagcattctccgaaacttctttgtgatgtatgcattcaactcacagagttgaacataacttttcatagagcagttttgaaacactattttcttagaatctgcaagtggatatttggactgctttgaggcctttgttggaaacgagaatatcttcacataaaacctgtaaacaagcattctcagaaacttctttgtgatgtgtgcattaaactcatagagttaaacataccttttcatagaccagttttgaaactctctttttgtagaatctgcaagtggatatttggactgctttgaggcattccttggaaacgagaatgtcttcccataaaaacgagacagaaggattctcagaaactccattgtgatgagtgcatttaactcacagatttgaacctttcttttgatagagcaattatgaaacactcttttttgcagaatctgcaagtggacatttggaaagatatgaggcctaaagtggaaaggaaatatgttcacataaaaactgtgggtgcagcgcaccagcatggcacatgtatacatatgtcactggcctgcacaatgtgcacatgtaccctaaaacttaaagtataataaaataaataaataaataaataaataaataataataaactagacagaagcattctcagaaacttctttttcatgattgcattcaaatcactgtgttgaacataccttttcatagagcagatttgtaacactgttttcgtaaaatctgcatgtggctattttgactgctttgaggtcttcgttggcaacaggaatatcttcacataaaaactagacataagcattctctgaaacttctttgtgatgtgtgcattatactcacagagttgaacatactttttcatagagaagtttttaaacactcttttcgtagaatctgcaagtggttatttggactgctttgaggtgttcgtcggaaacgggaatatcttcacaaaaaaaactagacagaagcattctcagaaacttctttgtgatatgtgcattcatctcacagagttgaacataccttttcatagagcagttttgaaacactctttaagtagaatctgcaagtggatatttagactgctttgagacctttgttggaaacgggaatatctttacataaaaactagacagaagcattctcacaaaattatttgtgacgtgtgcattcaactcacagagctgaacctttcttttgatagagcagttttgaaacaatctttttgcacaatctgcaagtggacatttggagagctttgaggcctctcgatgaaaagtaaatatcttcacataaaaagtggagagcagcattctcagaaaattctttgtgatgtttgcattcaactcatagagttgaacattccttttcataaagcagttttgaaacagtcttttcgtagaatctgcaagtggatatttggactgccttgaggcctacattggaaacgggaatatctttacattaaaaactagacagaagcattctcagaaacttctttgtgatgtgtgcattcaactcaaggtgttgaacttaccttttcttagagcagatttgaaacactcttttctttgaatctgcaagtgaatattttgactgcttggaggccttcgtttgaaacaggaatatcttcacataaaaactagatagaagcattccagaaacttctttgtgatgtgtgcattcaactctcagagttgaacctttcttttgatagagctgttttgaaacacaatttttgtaggacctgcaacgggacatttggagagctttgaggcctatggtggaaaaggaaatatcttcacataaaaactatacagaagcattctcagaaacttcttggtgatgtttgcattcaactcgcagagctgaacacacgttttcatagagcagttttgaaacactcttttcatagtatcatcaggtggataattggactgccttgaggccttcattggaaacgggaatatgttcacataaaaactagacagaagcattctgagaaacttctttctgatgtgtgcattcaactcacagatttaaaccttacttttgatagagcagttttgaaaaactctttttgtagattctgcaagtggacatttggagtgctttgaggcctgtggtggaaaaggaaatatcttcacataaacactagacagaagcattctcagaaacttctttgtgatgtttgcattcaactcacagagttgaacgtgcctttccattgagcagttttgaattactcttttcgtagaatctgcaagtggatatttggaccgcttttaggccttcgttggaaatgggaatatcttcacttaaaaactagacagaaacattctcgaaacttctttgtgatgtgtgcattcaactcacagagttgaacttagtttttcatagggaaattttgaaactctcttttcgtagaatctgcaagtggatatttggactgctttgaggccttccttggaaaggggaatatcttcacataaaaactagacagaagcattctcagaaacttctttgtgatgtgtgaattcaactcacagagctgaacctttcttttgatagaacagttttgaaacactctttttgtagaatctgcaagtggacatttggaatgcttggaggcctatggtggaaaaggaaatatcttcacataaaaaccagacagaagcattctcagaaacttctttctgatgtttgcattcatctcacagagttgaacataacttttcatggagtagttttgaaacactcttttcatagtatctgcaaggggatatttggactgctttcaggccttcttggaaacgggaaaatcgtcacataaaacatagacagaagctttctaagaaacatctttgtgatgcgtgcattcaactcacagaattgaaactttattttgatagagcagttttgaaaccctctttttgtagaatctgcaagtgaacattttgggagctttgaggcctatggtggaacaggaattatcttcacataaaaagtagacagaagcagtttcagaaacttctctgtgatgtgtgcattcaactaacgcatttaaatctttcttttgatagagaagtgttcaaacattctttttgttgaatctgcaatggatattttgggctctatgtggcctgcggtggaaacgggaatatcttcacataaaaaaagagagaagcattctcagaaacttctttgtgatgtgtgcattaaactcatagaggtgaacataccatttcatagatcagttttgaaacactctttttgtaggatctgcaagtggatacttggagaagtttgaggactatggtggaaaggggaatatcttcacataaaaactagacagaagcattctcagaaacttctttgtggtgtgagcatgcaactcagggagttgaaccttccttttcatagaacaaatatgaaacagttttttgtagaatgtgcaagcggatatttagagtgccttgaggcgtatggcaggagaggaaatgtcttcatataaaaactagatagaagcattctcagaaactaatttgtgacgttcgcattcaactcatattgttgaacattacttttgatagagtagttttgcatcactctttgtaagatctggaggtggatatttgtacagctttgaggccttcggtggaaacaggaatatcttcacctagaatctcgactgaagaattctcataaacttctttgtgagtgtgcattcactcagagagtgaccttccttttgatagaggagaacagttttgaaacacactttttgtagaatctgcaagtggatatttggagcgctttgaggccttcattggaaacgggaatatcttcacataaaaaatagactgaagcattctcagaaacttctttgtgatgtttccattcaactcacagagttgaacattccttttcatagagcagttttgaaacactcttttcgttgaatttgcaagtggacttttggaaagctttgaggcgtacggtggaaaaggaagtatcttcacataaaaactagagagaaacagtctcagaaacttatttggatgtgtgcattcaactcagagagtttaaccttgcttttcatagagcagttttgaaacactctttttgtagaataagcaatgggatatttggagcgcttttaggccaaaggtaaaaaaggaaatttcttcgtattaaaaactatacagaagcattctcagaaactattttgtgatgtgtgcatttaacctacagtgttgaacctttctttggatagagaagttttgaaaaactctttttgtagaatctgcaagtgtacattttgagaatgttgatgcctgtggtgaaaaaggaaataaattcacagtaaaaccaaacagaagctttctcagaaacttctttgtgttgtttgcattcaactcacagagttgaacattcctattcatagagcagttttgaaacactctttttgtagaatctgcaagtggatatttggacctctttgaggccttcggtgcaaacgggaacatcttcacataaaaactagacagaagcactatcaaaaacttctttgtgatgtgtgcattcaactcacagagttgaaccatcgttttgatagagcagttttgaaacactctttttgtagaatctggaatcgtatatttggagcactttgaggtctatgttggaaaaggaagtatgttcacataaaaagtagacagaagcattctcagaaatttctttgtgatgtgttcaacaaacagaggtgaaactttcttttgaaagagcagttttgaaacactctttttgcagattctgcaagtggatatttggagctctttaggtcccacggtggaaacgggtatatcttcacataaaaagtagacagaagcattctcagaaacttctttgtgatgtgtgcactcaactcagtgagttgaacagtcctttggaaaaagtagttttgaaacaatctttttgtaaaatctgcaagtgcatatttgcagagctttgaggcctatagtaaaaaaggaaataaattcacataaaaactggacagaaacattatcacaaacttctttttgaggtttacatttgcttttagttgaatgcacacatcacaaagaagtttgtgagaatgtttctgtctagtttttatgtgaagatattcccttttcaaccataggcctcaaagtgctccaagtattcacttgcagattgtacagaaagagtgtttcaaaactgctctatgaaatggtatattcacctctgtgagttgaatgcatacatcacaaaggagtttctgaaacgattatgtctagtttttatgtgaagatatttccttttccaccataaccctcaacgtgctccaaacgtccactttcagattctacaaaaagagtgtttctaaactgctctatcaaaaagaaggttcaactctgtgagttgaatgaacacatcacaaagaagtttctgagaatggttctatctagattttatgtgaaaatattaccttgtccaccgaaggactcaaagagctccaatagtccacttgcagattctacaaaaaaagtgttttaaaactgctctatgaaaaggaaggttcagaacaaagctggaggcatcacactacctgacttcaatttacactacaaggctacagttaccaaaacagcatggtactggtaccaaaacagacatataaaccaatggaacagaacagagccctcagaaataatgcctcatatctacaactatctgatctttgacaaacctgagaaaaacaagcaatgggggaaggattccttatttaataagtggtgctgggaaaactggctagccatatgtagaaagctgaaactggatcccttccttacaccttatacaaaaatcaattcaagatggattaaagacttaaacgttagaccgaaaaccataaaaaccctagaagaaaacctaggcattaccattcagggcataggcatgggcaaggacttcatgtctaaaacaccaaaagcaatggcaacaaaagccaaaattgacaaatgggatctaattaaactaaagagcttctgcacagcaaaagaaactaacatcagagtgagcaggcaacctacaaaatgggagaaaattttcacaacctagtcatctgacaaagggctaatatccagaatctacaatgaactcaaacaaatttacaagaaaaaaacaaacaaccccatcaaaaagtgggcaaaggatatgaacagacacttctcaaaagaagacatttatgcagccaaaaaacacatgaaaaaatactcatcatcactggccatcagagaaatgcaaatcaaaaccacaatgagatactgcctcacaccagttagaatggcaatcattaaaaagtcaggaaacaacaggtgctggagaggatatggagaaacaggaacacttttacactgttggtgggactgtaaactagttcaaccattgtggaagtcagtgtggcgattcctcagggatctagaactagaaataccatttgacccagccatctcattactgggtatatacccaaaggactataaatcatgctgctataaagacacgtgcacacgtatgtttattgtggcattattcacaatagcgaagacttggaaccaactcaaatgtccaacaatgatagactggattaagaaaatgtggcacatatacaccatggaatactatgcagccataaaaaatgatgagttcatgtcctttgtagggacatggatgaaattggaaatcatcattctcagtaaactatcataagaacaaaaaaacaaacactgcatattctcactcataggtgggaattgaacaatgagatcacatggacacaggaaggggaatatcatactctggggactgttgtggggtgggtggaggagggagggatagcattgggagatatacctaatgctagatgacgagttagtgggtgcagcacaccagcctggcatatgtatacatatgtgactaacctgcacaatgtgcacatgtaccataaaacttaaagtataataaaaaaaaagaaaaggaaggttcaactctttgagttaaatgtacacatcacaaataagtttctgagactacttctgtcactgctctaccaaaagtaaggttcaactctgtgaattgaatgcacacatcaaaaagaagtttctgagagtgtttctattttttatgtgaagatattcccttttccaacgaaggcctcaaagcagtccaaatatcgacttgcagatactaagaatagagtgtttcaaatctgctatatgaaaaggcattttcaactctgtgaattgaatgcacacatcacaaagatgtttctgagaatgcttctgtctagcttttatgtgaatatatttttttccaccatagtcctcaaagctctccaaatgaccacttgcatattctacaaaaagattgtttcaaaactgctctatcaaaagaaaggttcaacactgtgagttgaatccacatatcacaaagaagtttctgaaaatgcttctgtctagtttttatggaatatattcccatttccaacgaatgcctcaaagtagtccaaatatccacttgcagatacaacaaaaagagtgtttcaaaactgctgtatcaaaagaaatgttcaactcggtgagttgaatgctcacatcacaaagaagtttctgagaatgcttctgtgtagtttttatgtgaagatattcccttttccaatgaaggcctcaatgccatcaaaatatccgcttgcagattctatgaaaagagtgtttcaaaactgctctatgaaaacatatgttaaatcctgtgtgttgaagataaacatcacaaagaagtttctgagaatgctctgtctggtttatatgtgaagatatttccttttccacacaaggcctcaatgctctccaaatgtccacttgcagattctacaaaaagagtgtttcaaaactgctctttcaaaagaaagattcaactttatgagttgaatgcatccatcacaaagacgtttctgagaatgcttctgtctagtttttatgtgaagatattcccgtttccaacgaaggcctcaaggcagtccaaatatccacttgcagattctacgaaaagagtgtttcaaaactgctctatcaaaagaaaggttcaactctttcagttgaatgcacacatatcaaagatgtttctcagaaaacctctgtctagtttttaagtgaagatattcccgtttccaacgaagccctcaaagcagtccaaatatccacttgcagattctacgaaaagagtgtttcaaaactgctctatgaaaagatatgttcaaatatgtcagttgaatgcaaacatcacaaagaagtttctgagaatgcttctgtctggttttcatgcgaagatattcctgtttgcaacaaaggtctcaaatcagtccaaatatccacttgcagattctatgaaaatagtgtttcaaaactgctctatgaaaaggtatcttcaactctgtgagttgaatgcaaacatcacaaataagtttctgaggatgcttctgtctagtttttatgtgaaggtattttcttttccaccgttggcctcaaagtttccaaatgtccacttgtacattctacaaaaagagtgtatcaaaacagctgtatcaaaagaaagcttcaactctgtgagttgaatgcacacatcacagaaaagtttctgagagtgtttctgtctagtttttatgtgaacatatttccttttccaccacaggcctcaaagtttccaaatgtccacttgcatattctacaaaaagagtgtttcaaaactgccctatcaaaagaaagattcaactctgtgagttgaatgcaagcatcagaaataagtttctgagaatgcttctgtccggtttttatgtgaagatattcccgtttccaacgaaggcttcaatgcagtccaaatatccacttggagattctacgaaaagagtgtttcaaaactgctctatgaaaaggtgtgttcaactctgtcagttgaaagcaaaattcagaaagaagtttctgagaatgtttcagtctaatttttctgtgaagatatttcctttccaccataggcctcaaagctctccaaatgtcccattgcaggtactacaaaaatggtctttcaaaacagctctatcaaaagaaaggctcaactctgtgagttgaaagcacacatccaaagaagtttctggaatgcttctatcgagtttttatgtgaagatattcccgtttacaacgaaggcctcaaagctgtccaaatatccgcttgcagattctacaaaaagagtgtttccaaactgctctatgaaaaggtgtgttcaactatgtgagtggaatgcaaacatcacaaaaaagtttctgagaatgcttctgtctagtttttatgtgaagatattcccgtttccaaggaagtcctcaaagcagttcaaatatccacttgcagattctacgaagagtgcttcaaaactgctctatgaaaatgtatgttcagctctgtgagtttaatgcaaatatcaccaagaagtttctgagaatgcttctgtctagtttttatgtgaagagatttccttttccaccgaagtcctcaaagctctccaaatgtccacttgcagattctagaaaaaaagtgtttcaaaactgctgtatcaaaagaaaggttcaaatatgttagttgaatccacacatcacaaagaagtttctgagaatccttctgtctagtttttatgtgaagatattcccatttccaacgaaggcctcaaagctgtcaaaatatccacttgcagattctacgaaaagagtgtttcaaaactgctctatgaaaggcatcttcacacagagagttgatgcaacgtcacaagaagttctgagatgctctgtgtagttttatgtgaagatattccttttcctacagctacaatcgcccaatgtcactgcgatctacaaagagtgttcaagtgcctatcaagagttcacctctgatgagcactccaagattcagagctcgtagttatgaagatctttccgaaccacttgcagattctacgaaaagagtgtttcaaaactgctctatgaaaaggcatcttcaacacagagagttgaatgcaaacgtcacaaagaagtttctgagaatgcttctgtgtagtttttatgtgaagatatttcctttttcactacaggctacaaatcgccccaaatgtccacttgcagattctacaaaaagagtgtttcaaaagtgctctatcaaaagaaagtttcaccactctgagttgaaagcacacatcacaaagaagtttctaagaatgcttctgtgtagtttttatgagaagatatttcctttttcaccagagacctcaaagcgctccaaatgtccacttgtagattctacgaaaagagtgtttcaaaactgctctatcaaaataaaattcaactctgtgagttgaatgcacacatcacaaagaagtttctgagaatgcttctgtcaagtttttatgtgaagatatttagtttttcacaataggcctcaaagctctccaaatttccagttgcagagtctacaaaaagagtgtttcaaaactgctctatgaaaagaaagtttcacctctgtgagtttaattcacacatcacaaagaagtttcagagaatgcttctgtctagtttttatgtgaagatatttcctttttcaccataggcctcaaagcgctcctaatgtccacttgtagattctacaaaaagagtgtttcaaaaccgctctataaaaagaaaggttcaactctgtgagttgaatgcacacatcacaaagaagtttctgagaatgcttctgtctagtttttatgtgaagttatgccgtttccaatgaaggcctcaaagcgttccatatatcctcttgcagattctagaaaaagagtgtttcaaaactgctctataaaaaagaatgttcaactctgtgagttgaaagcaaacatcacaaagaagtttctgagaatgcttctgtgtagtttttatgtgaagatattacgtttttcaccataggcctcaaagagctccaaatgtccacttgcagatcccacaaaaaaaagtgtttcaaaactgctctattaaaggaaaggttcaactctgtgagttgaatgcacacattaaaaagaactttctgagaattcttctgtctagtttttttgtgaaggtatcccgtttccaacgaagatcttaaagcggtcaaaacgtccacttgcaaattctacaaaaagagtgtttcaaaactgctctattaaaataaacgttcaagtctgtgagttgcaggcccacatcagaaagaagtttctcagaatgcttctgtgtagtttttatgtgaagatatttcccttttcaccataggcttctaagcgctccaaatgtccacttgcagattctacaaagaagtgtttcaaaactgcgctagaaaaagaaatgttcaactctgtgagttgaatgcacacaccacaaagaagtttctgagaatgcttctgactagtttttgtgaagatatcccatttccaacgaaggcctctaagcagtacaaatatacacttgcaaattctacatatagagtgtttcaaaactgctctatgaaagggaatgttcaactctgtgagttgaaagcaaacaacacaaagaagtttctgagcattcttcagtgtagtttttatgtgaagatatttcctttttcaccatgggcctcaaagcactccaaatgcccagttgcagattctacaaaaacagtgtttcaaaactgctcaatcaaaagaaagagttgaatgcacacatcacaaagaagttgctgagaatgcttctgtgtagtttttatgagaagatatttcctatttcaccacaggcctcaaagcgctccaaatgtccacttgcagattttacaaaaagagtctttcaaaactgctctatataaagaaaggttcaactctgtgagttgaatgcacacatcataaagaagtttctgagaatgcttctgtctagttttaatgtgaagatatttcctatttcaccgtaggcctcaaagcattacaaatgtccagttgcagattctataaaaagagtgtttcaaaacagctctatcaaaagaaaggttcaactctatgagttgaatgcacacatcacagagaagtttctgagaatgcttctgtctagtttttttgcgaagatattcccgtttccaacgaaggccttaaagcagtcgaaatatccaattgcagattctacaaaaagagtgtttcaaaaatgctctatgaaaaggaatgttcaagtcggtgagttgaaagcaaacaacacaaagaagtttctgagaatgcttccgtgtaatttttatgtgaagatatttcctttttcataagcctcaaagccctccaaatgtccagttgcagattctacaaaaagattttttaaaaactgctctatcaaaagaaggattcaagctctatcaaaagagttgaatacatatatcaaaaagaagtttctgagaatgcttctgtctagtttttatttgaagttgtttcctttatcactataggcctcaaagcgctacaaatgtccacttgcagattcttgaaaaatattgtttcaaaactgctcggtcaaaagaatggttcaactctgtgagttgaatgcacacatcacaaagaagtttctgagaatgcttctgtgtagtttttatgtgaagttatttcctttttcaccataggttctaaagcgctccaaatgtccacttgcagattatacaaaaagagtgtgtctaaactgctctatcaaaagaacggtataactctgtgagttgaatacaaatatcacaaagaagtttctgagaatgcttctgtatagtttttgtgaagatatcccgtttccaaagaaggcctcaaagtgctccaaatgtccacttgcagattctacaaaaagagtgtttcgaaactgctctatgaaaaggaatattcaactctgtgtgttgaaagcaaacatcacaaagaagtttctgagaaggcttctgtgtagtttttatgtgaagatatttcctttttcaacacaggcctcaaagcactccaaatgtccacttgcagattctacaaaagagtttttcaaaactgctctatcaaagaaaagcttcaactctgtgagttgaatgcacacatcacaaagaagtttctctgaatgcttctgtctagtttttatttaaagatatttttttcaccataggccttaaagtgctacaaatgtccaattgcagattccacaaaaagagtgtttcaaaactgctctatcaaaagaaagattcaacactgtgagttgaatgcacacatcacaaataaatttctgagaatgcttctgtctagtttttgtgtagatatcccgtttccagtgaaggcctcaaagcggtccaatatccacttgcaaattctacaaagagagtgcctcaaaactgctctatgagaaggaatgttcaactctgtgagttgaaggcaaacaacactaagaaggttctgagaatgcttctatgtagttgttatgtgaagatatttcctttttcaccatgggcctcaaagcgccccaaatgtccagttggagattctacaaaaagagtgttttaaaactgctctatcaaaagaaagagttgaatgcacacatcacaaagaagtttctgagaatgcttctgtgtagtttttatgtgaagatatttgtttttcaccacaggcctcaaagcactccaaatgtccacttgcagattctacaaaaagattgtttcaaaattgctgtatcaaaagaaaggttcaactctgtgagttgaatgcacatatcacaaagaagtttctgagaatgcttttgtctagtttttatgtgaagatatttactttttcaccatcggcctcaaagtgctacaaatgtccacttgcagattctacaaaaaagtgtgtcaaaactgctctatcaaaagaaaggttcaactctgtgagttgaatgcaaacatcacaaagaagtttctgagaatacttctgtctagtctttgtgaagttatcccttttccaacgatggactcaaagcagtccaaatatccacttgcatattcaacaaaaagagtgtttcaaaactgttctatgaaaaggaatgttcaactctgtgagtttaaagcaaacaacagagaagtttctgagaaggcttctgtgtagtttttatgtgaagatatttcctttttcaccataatcttcaaagccctccaaatgtccagttgcagattattcaaaaagattgtttcaaaaccgctctatcaaaagaaaggttcaactctgtgaattgaatgcacacatcacaaagcagtttctgagaatgcttctgtctactttttatgtgaagatattcccgtttccaaagaaggcctcaaagagctccaaatatccactagcagattctagaaaaggagtgtttcaaaactactctatgaaaagtaaagttaaactctgtgagttgaatgcacacatcacaaagaagtttctgagaattcttctgtctagtttttatgtgaagatattttcttttccaccataagcctcaagtttctccaattatccacttggagattctacaaaaagactttcaaaactgctctatcaagaggaaggttcaactcagtgagttgaatgcacacaacgcaaataagtttctgagaatgcttctatctagtttttatgtgaagatatttccttttctaccataggccacatatcactccaaatatccatttgcagattctacaaaagactatttcaaaactgctctctcaaaatgaaaactcaactctgtggtttgaatgcagacatcacaaaggagtttctgagaatgcttctgtctagcttttatgtgaagatatttccttttccaccataggcctcaaagcgctccaaatgaacacattcagattctacaaaaagaatgtttcaaaactgctttatcaaaagaaaggttaaactctgtgagttgaaagcccacttcacaaagctgtttgcgagaatgtgtctgtctggttcttatgtgaaaaaatccccgtttccaacgaaagtctcaaagagctccaaatatccactagcagattattcaaaaggagtgtttcaagactactctatcaaaagaaaggttcaactcagtgagttgaatgcacacatcacaaagaagtttcttagaatgcttctgtctagtttttatgtgaagatatttccttttccgccataggcctcacatctccacaaatatccacttgcagattctacaaaaagactgttttaaaactgctctatcaaaaggaaggttcaactctgtgagttggatgtacacatcacaaagaagtttctgagagtacttctgcctaatttttgtgagaagatatttcctttttcaccataggcctcaaagcgctccaaatgattacttgcagattctacaaaaagaatgtttcaaaactgctctatcaaaagaaaggttaaactctgtgagttgaaagcacacttcacaaagatgtttgtgagaatgcgtctgtccggtttttatgtgaagatattcccgtttccattgaaggcctcaaagctccaaatagccactagcagattctacaaaaggagtgtttcaagactgctctatcaaaagaaaggttcaattctgtgagctgaatgcgcacatcacaaagaagtttctgaaatgtttcggtctagtttttatgtgaagatgtttcctttcccaccataggcctcaaatctctcaaaatatccacttgcagattctacaaaaagagtttcaaaactgctctcctaaaaagaaggtagaactctgtgagtttaatgcacacatcacaaataagtttcagataatgctgctgtctagtttttttttgaagatatttccttttccaccataggcctcaaagcactccaaatgaacacatgaagattctacaaaaggagtgtttgaaaactgctctatcaaaaggaaggttcaactccgtgagtttaatgcatacatccaaagcagtttctgagaatgcttctgtctagtttttatgagatgatatcccgtttacaacgaaggcctcaaagagctccaaatatccacatgcagattctacaaaaggagtgttgcaaaactgctctatctaaagaaaagttcaactctgagtcaaatgcacacatcccaaagaagtttatgagaatgcttctctctaggtattatgtggagatatttccttttccaccataggcctcaaattgctctaaatatccacttgcagattctacaaaaagaatgtttcaaaactgctctatcaaaaggaaggttcaactctgtgagttgaatgcacagatcacaaagaagtttgtgagaatacttctgtctagtttttatgtgatgatattcccatttccaacgaaggccacaaagagccccaaatatccaccagcagattctacaaaaggagtgtttcaaaactgctctatcaaaagaaaggttcaactctgtgagtcgaatgcacaaatcacaaagaagtttctaagaatccttctctctggtttttgtgtgaagatatttccttttccaccctaggtctcaaattgctccagatatccacttgcagatctacaaaaagactgactcaaaactgctttatcaaaagctatgttcaactctgtgagttgaatgcaaacatcacaaagaagtttctgagaatccttccatctagtttttatatgaacatattttcttttacaccataggcctcaaagcgctccaaataaacaattgtagattctacaaaaagagtgtttcaaaactgctctatccaaagaaaggttcaactccgtgagttgaatgcacacatcacaaagaagtttctgagaatgcttctgtctactttttctgggaagatattgcagtttccaacgtaggcttcaaaaatctccaaatatccactatcagattctacaaaaggagtgtatcaaaagtgctctatcaaaagaaagcttcaactcggttagctgaatgcacacatcacaaagaagttcgtgagaacgcttctgtctagtttttatgggaagatatttctttatccaccataggcctcaaatcgctccaaatacccacttgcagattctacaaaaagactgtttcaaaactgctctatcgaaagaaaggttcaattctgtgagttgaatgcacacatcacaatgcagtttctgagaatgcttctgtctagtttttatgtgaagatattcctgattccatcgaatgtctcacagagctccaaatatccaatagcagattaaacaaaaggagtgtttcaaaacttccccattcaagcagaaacacgtttggagagagaaacaatcatgacactgatctcccggaagtgtctccctgaaggacttggaagtcatcttcgttgaagacatttggccagagcgagaggcatctaggcccctgagaaacaggggaggcacagcaagagggaagacagagcagaggccagagcccagagcccaggcaggatacagaaccatgccactgccacgggcataaggggaaggttccaaaagggtggcttgtccagagatgccagcattccagtgacaggggttgttgccatctcccattaccggcttcctcttgcagactgtatcgtggtgtggcttcatttctcagagaagagccgtgaaaagatacaaccatcttcactgacgtgggtcctctcctctcctgcaggacgaagagctcctgtgggtctcttgtcctcggctgcagtgtgttcatcttgatcctagaaaagaggacgcgcagaaaggggatgagattacaattgctccgggaccgacgcatctcctcacgtgggccaggccttcacacacccaaagcgggaccgcgacggcaaagacgattgacaaccggatgcacgacccaggcagagacgcagaaagaggctcaccaaagacaggccgacatgcgaaaaatcgctctgtggtgcactgggcgcattcggccaaagacacacatgcacacgggcacacacacacagacagagagagggaaagaaacacacagagactgagagacaaagagaagagacaaagggagacacacactcacacacacactcacactcacacacacacacacggagtcatacagcagaggcattgaaacacacacccccaggcaacccctgaggctgcggggttctgctctccacgagaacgaccctcgggtgagagagcagcccaggggcacgcaggccgacctgtcctcgagaccacggcggcacgacttttggggagactccccaacacggtccgggcaggcctgaggctgggatgccatgctgcttccagcgaactccgcctggggtttccacatcctggtcggccctttgcgacccctggcatccggagacattcccgtcgaccccgtggagaggtcaggccggagcctcagagccccgacacccaagcagtgccacggagggctcctgctctgccaagcctcagggactggtttctaagacaaccgcgggaagcactgtgacgtgagaagccgctcgcgccttgcgcatgcgcattggctacgccgactcaggctgcatcccctttaaataagtccacagctacgcgtcagcagcgagtgtcctcctgcagccacggtggtggctggacccggggtccagttgggggtggcgtttgagaggaggccgcgggggtcctgtcccagcacgaaactcccaggagtcctgtcctcaggacctccttgggcggacttccaccgagggagggggagcttcaggacgcctgctgtgttctcgggactccccttcagatgcgattttggccccttccgagtgagataggatgggctcaccactcctgatgaggcaggcagggcctcgctgcagcacaagtcgatcccatgagtctcaaggcgtgttgtcagctgaaaattcactgatccatcagccctctgcctccctcctcctttgaaagagcaggggcctgcccttcttctaaaagctctgggcctccagaaagccgagagtgctttacaggacacgagcaaacaggaacaggggttaatccgagctggagaccatgcggccaggcatggtattggcatatcccagagcagatgctgtgattgtgtgtcaccggaggcatatggggcgacggcgaaacaaacggttgtgttcatgcttgtgcccggtggacagtgcacttttgggttaatgctgaaatgagttaagactttgggggactgttgggaaggcgtaataaattttgaaatgtgaggacatgagatttggagggtccaggagtggaaaaatatggtttgactatgtccctacccacatctcaacttgaattgtattgctcagaattcctacgtgttcggggagggaaccagggggacgtagttgaatctttgggaccggtctttcccatgctattcttgtgatagtggataaatctcacaagatctgatgggattattaggggttttgtcttttgcttcttttgcctccgtctcatattctcttgccactgccatgtaagaagtgctgttcacccgctgccgtaactctgagtcctcctcaaccatgtgaaaccctaaatccaattaagtctctttttcttccctgtctcaggtatgtcttcatcagcagtgcaaatgtgacatttggtattgtcaaatttcttaataattgtggggagaatagatgtgtagtatcttgtgcattttcctgattactaatgaggttgagaattttttttacattttgcatgctttatcttttgagaaatccctattgatgtcttttccgaattttctgttgggttgctatttttaaaattaattcataggagctccttatacttagttgatctgattgtaatctttcataggttttaggtactgcaaatatcttctaatttatagtttatcttttcacttttttacttttattttttaatttcttttttttttgagacagagtctagctctgttattcaggctggagtgcagtggctcactccacctcttgggttcagacgattctcgtgcctcagcttcccaagtagccgggattacaggtgtctgccactaatgccaagctaatttcttgtatttttaggagagatggcatttcaccatgttggccagcctggtctcaaactcctgacctcaggtgatgtactgttgggattacaggattgagacactgtgcccagcctatcttttcagtttttggtgtaaaaagttcttaattttgtgatagtcaaaatgtctaatcttttttaatggttaaatggctttttgtgtctcattcacttacattttctactaaaagttttgaagttttgtttctgacatgtaagtctttggtcctcaggaatttaatgtttgtatatagagcgaggcaggaatataatttcattttgtttcttatatcaataaccattatttttctattctatttattgaaaagtcctttctttccttgctgatctgccatgtcacctacatcacatatcaaagattaaatttgtggagatttgtttgggaactctctattctgtttcattagtcagtttatcagtgaggaccacactgtcttaactgctgtagctttataaaagttctgatatttgccagcacaaatctttcctcttcttcaataatgtctttgatattcttggccccttcccttttctatatatatgtggatatatattatttatatatatttatatatatttttagagagagagaggcaaggtctcactttgttgcccaggcttgaggactggtgcaatcatagctcactgcagacttgaactgctgggctcaagaactcctcctacctcagcctcccaagtaactgggactctaatgcatgcaccacctcatccagctaattttaaaaaaatatattatttttgtaacgatggggatcttgctatgctgcccaggctggtctcaagcttttggcctcaagcaatcctcccacctcaagctcccaaagtgctgggatcacaagagtgagccaccacacctggctccattttccatattttaagaccattttttaaaaggtgctcaagactgcttttttctcttggtgctactggcaattcccatacttagctttggaaatactcttaatgaagaaaatctaaagagttgaaaaataaaatgttatttcttttcttccagttgcaaaagaacagacagcctcctgaattacaaagctagttttgataaattggtgaactgagagcatacacagtattattaattctgctctaatttctgcttcactgtggagtgtcttcacagagtcttaaaagattattgctatgaaatagtcttatacatgtaacacataaccgctacaattctgcagttgtacttggctgtcttaactaataatcaattgctttgcttcataatatttaaattggcatctttattttccaaaatgcataaatactagtaaagatttttagttaagccagaagaaagtagactttatttactaacatatcttatatgtaaaggtttaataaatctccctgcatcttttcttttgcatcataacaaccactgaaaataatatttctatagcagttgggggtaaatggacaatgacttttgtggccagaggtgaatggcccaggggctcctgcactccaggtccctctgagcctgccacacagctgagggcatcggtatttccacacactacagtgcacgctgtcccagaacacagatcagatgctctcctttattcaaatggggagttgagagtattgtcattgtaattaaattaataaatacatatttatacactgttaaaatctggttggctttgtgtcccttcacaaaacaaattgcttaaatgaaaccacagagttaacataaatgagtacatttgcttctataagatgctcttttaaatggaattagaacctaatttgaaatgtcaattaaaagtttaaatattcaactcaattacatttagatttttgttttgttttgttttgagacagaatttagctcttgtcacccaggctggaatgcaatggtgcaatctcagatcactgcaagcatcttctcccaggttcaagcaattctcttgcctcaacttcctgagtagctgggattacaggtgcctgccaccatgcctggctaatttttgtattttcagtagagatggggtttcaccatgttggccaggctggtcctgaactcctgacctcacgtgatccacccaccttggcctcccaaagtgatgggattacaggtctgagccaccgcgcttggcctttttagattattttactttattttagttacttatttttatgactttattgttataaaaatgctagcttttttaaaaaatcaatcaatataacaaagaacatagaagatgatcaacaagcattcccacttccatgatctggaaataactgtcatcaatccaaaagctgacacatggtggatcccttcacaccagttcccagaaaaaagtaaccccttgcttgtggaaaacattattattatcattagtattttcgagacggaatttgagtcttgtagcccaggctggagtgcaatggtccaatctcagctcactgcaacttctgcctcccaggatcaaagtattctcctacctcagcctcccaagcagctgggattacaggcatgcaccaccatggcgtgctaattttttgtatttttagtagagacagggtttcaccatgttggccaggctggtgtcgaactcctgacctcaggtgatccacttgcctcaaccttccaaagtgttgggattacaggcatgacccaccacacctggaccagaaaacactattcaatagcaaacagtagcagtatgcttgggggttttaggaatgttgattttcaaatctctagaaaagttcaatgaattaccttaggctataatcccagggcagtctcatctgttaatagggggctggtctaagggtccttccagctctcagattaatggtttcccatgttgaactgctccctgccacccacgcatccttggttttgtttgtttgtttgtttgtttgtttgtttgtttgtttttatagagacaaggtctcactatattgcccaggctggtctacaactcctggcctcaagcaatactcccaccttggcctcccaaagtgttggagttacagatgcgagcctttgtgctcagcccatccttggctgttcaaatgtggaggtaaattgtagatgccaagtttacctccaggtcagaagggtcagatgccccagggcagaatcataaccctaaccaggcctcccactgcgtgaagaccttattttctgaagcttaaacctggacaaaggtctgaccagtagcactgtgttcatgaatgccaggtcaaaaatttaaaactgggactatccagaagaacctggtagatgcaggtgcagtctgcagtccaatggtcagccacaaaaacaggctacctgttctttctctttaccatggagtccttgatgtaaaaattgaatgacactttcttgctcctggtgtgcttccctttcttcttcaatttccataagtagtttcctccatcccacctcccaacaggccacagtcaattcaggacattttaaccatgaaagtcagtctacataacacgaatttagaggccaggcagggtggctcatgtctctgggagactgaagtgggagaatagcttgagcttaggagtttgaggccagcctgggcaacatggtgaaaccctgtctttaaccaaaaataaatgaataaaaaaaaaaaagccatgtatggtggtgcatgctactagtccagctactcaggagtctgaggtgggaggattgcttgagtcaaggaggtcaagtctgaagtgggccaagatcatgccactgcaatccagcctgggcaacagagtgagaccttatctcaagaaaaaaaaaaatgatttaaaggacagactgactctcttattacaagccaatgctcatttgccattccataaatcctagggaacctcttaagaattatgctaaatctactctacccgtgctctataaatggattcactattgtagatgccactaagaacattcatgattcaccagaggaggtaaaaatagcagcattaatgggagtttggaagaagttgattctaactcccataaatgactttgaggggtttgagaccatagcagaggaagtaaccacagatgtggtgaagatagcaagaggactagtatgaaaagtggagcgtgaagatgtgagtgaattgttgcaatcttttttttttttttttttcgagatggagttttgctcttgttgcccaggctggagtgcaatggtgcgatctcagctcactgcaacctccacctcctgggttcaagcgattctcctgcctcagcctcccgagtagctggtattgtaggcatgtgccacaacacccggctaattttgcatttttagtacagaaggagtttcaccatattgttcaggctggtctcgaacttccaacgtcagatgatccacccatttcagcctacaaaagtgctgggattacaggcatgagccaccacacctggccagattgctgcaatcttaatggatgaggagttgcttattatgaatgagcaaagaaagtggtttcttgggatggaatctactcctggtgaagatgccgtgaacattgtggaaagaacgacaaaggacttagaatattccataaacttagttgacagaggagtggcagggtttgagaagattgcttccagttttgatataaattctactgtgggtaaaatgctacgaaactgcgtagcatgctacagtgaaatcttttgtgaaagcaagagtcagtcaacccggcaaacttccctgtcatgttattttaagaaattgccacaccttctccagccctcagcaaccatcaccctgatcagtcagtagctatcaacactgagacgagaccatccaccagcaaaatgattatgacttgctgaaggcccagatgatggttagcattttttggcaatcaagtattttcaaagtaaggtatatacattatattttagacataatgctattgcacacttaattgactacagtagtttaaacacaactttcttttttgagatggagtcttactctgttgcccaggttggagtacagtggtgtgatcttgtctcaccgcaaactccgctgcccaggttgaaacaattctcctgcctcagcctcttgagtagctatgaatacaggcgctcaccaccatttttgtattttcacagggtttccccatgttggccaggctggtctcgaacttctgacctctggtgatccacccgcctcagcctcccaatgtgctgggattacaggcatgagccaccatgcccggaaacataacttttatatgcgccagaaagcaaacaatttcttgtgactcgcaaaaaatttcatgtgacatgctctattgtgatattcgccttattgtggtgacctagaaccaaacatgcaatatctccaaggtgtgcctgtacccctgaaagcagagctggagtaaagacttgggtgtggatgatttatttgggaagtgattccaagaagcaagagtgagatgtgggaagagtgagccaggcaagaaaaaaaagccaaaataatagaatgccattgaggctgctcccatggactttttttatgtgggacctcccgagaggttctggaaagttatccaggactgtccacctgaaacatgagcctcgagcatttgcccacctgtcccacactggttgaggtcttcccctgaggctgttaacctgcaagtgtttctgggctgtatttgtgcttaggcaaaaccctgcaatagtggagatgtcccggggcggaaagtgtagcttgagtttgctggcagcacaagggaagcatgtgcttccatggaactcctcacggtggctgagactgaaagaaaggtgcgctgagaagacgtgacgcagtcgtcattgcacggaggaatcatagccatcgatcttggcaagaggacccccgccctgaatcccgcgcttgagaaggtgtctctctggccctccactgactgtaccccggtccacccagagctctcaccctctcttctagggcatacgctgggcactcaggcccctggccaaatgtacctgagcctgcatggcctcttccctgggtctatttcaaagtgaaaactatgcttgtccaaatggtgcccaaggctctactgtctgaaggggtgagaattgtggatggagcttgcatggggcctagggagtcccccacacaggagaaagcaaggcttctcaagtaaggacagggctagctatgatgaaagaaaaaaatttagcctggggctgaggataagctctccctttactaccacattcccatgcagagcaccaagaactcagagaattctacactggactttgaccttgtgggatattatggcggtatagttattgaagtagaagaatagaacatatttagctattttttagcttcatttataattcataattatttagacataatgcaaatatgggctggaattcatgttctgatttttgtggccttgagatagggaaaagggacccaggaaatgggctttatgtgcttggatggcttcatggaatccccaacttcattagcttctgtgaagactcaagattattgctaaaatccactttgtattatctttaaaaaccaagggatattatgtagctcagcggttagaaggcacttgactcaaaatatctatgaagcaaaggatataaatgactaagagcaggaggatcattacctgaaggggtggagggttgatctcaggatatgacctgtgaaatccttcctgctggctcagtgctgactgaacgtggagaaggagagccccaggagcaacacatatctgggataggagggaatgctgggaggaaggaaagagaaataagccctttttgtttttattgatacatgacaattataattatttctagggtacatgtgatattttgatacatgtatacaatgtgcactgatcaaatcaagataatttgcatatccatcacctcaaatatttatcatttatttgtgttaggaaaattccacatctttcctctagccattttgaaatgtataataagttgttgttgatgatcatcaccctattgtgctattgaacactagaacttcttctgttccttccatctaactgtatttttgtgcccattaaccaacttctaggaagggtaaaagagtgggtggatgaaaagggcccttcttaaggcaaagaaaatcttacaagaagggaagacatcttagaaggaaaaataaaaaggtggaccatggacttagagtggggactgcagaaattgaatggcaaagaaaaaaccaacttagcgatgtgaaaataaatctcaatgtcattcctttcacaggtccaatgtctgatattcttttggcaagctggatatgaagtaggaatttttctttgagtcatacattttcatgattataattattattgaataatagctgacaattattgagagcaattattgaggacaattattgagctttgacaagatcttttcaaaggcctttatatatgttttctccacttctaactgttagatattcttattattcccattttgtagatgagggatgcacaggcataaagcctgtgtggaggcagagagcagctaagtaacctgaccatggcccaacagcaaacaaatgatgggaccacatgcaaatccaggcagaacccttctgttatatgaagctcaatgtttccttgttttcatcttgttatgaatacgcctatttgcaaaggggttttgaagctacattaaaacattttgtggtcgtgcgcggtggctgatgcttataatcccagcattttgggagaccaaagtgggcagatcgcctgagctcaggagtttgagaccagcctggccaacttggtgaaaccctgtgtctattaaaaataaaaaaaaattagccgggcgtgttagtgtgcacctgtaaacccagctactctggaggctgaggcaagagaatcacttgaacctgggagaggaaggttgcagtaagccgagatcgtgccactgcactccagcctgggcgacagagtgagactctgtcaataaataaataaataaataaataagattgaattttgagctcctgaccatgtccctagattgtaatcatatgtactttgatatcttctaagatttattcttagtgcgttttttaagttaaagtatttactgagcatctactgtatatcacgtgctgatataggcatcagcggtgcagagaacatatggcacagtctctgccttcaagtaactttcactcaccacatatatttattaggacaccgatacatgtgaatataagatagtaagatagacattgcaacaaataattatttactgtaaacctatttcatagaattttaatcttaaagtactttcaccctatttccaaaaaatatgtattgcataactgtaaatggattttcagtttgaaatcatcatatgaactgcagtagcatctgctggtgaaatactgcttggcatctattagaatagtccaaacaattgggagagaactgtattattagagctgtaaaagttactgtctagaagtctcggaaaagaagaggaagttctatggtagatgaataagatgacatctaaactgttctcttaagctatgaagttctgtgggtatctcacagcgcaaaattcaagtgtatgcccacaactcctcatgccacaagatgtgacacctttccaatctctttttgcaaaagtttccaattctgtctcttataagagtattttttatacccacatattccagattttgtagtgcatgcaaagacaagatgggaagggggcttccattggttgatgccagctgctttatggaccaggtcctgcacgtgcatccctgttggttcttttatccccacatcagccgtaacccataggcattaacctccattgtacagatgaagaaattgaaactctaagagaatatgcaatttacccagagtcatgcagcttgtgtatataagagttggaatgaaaatccaatctgagtctcaagtccccttccacaatatggtttccatttcattttgcaatcaccttagctgggatatgtctgccctaaaagatagtaagtaggaatacttgtctctataccttaacctaacatccatgggcttcattttttgtatttggaggtgtcataacgttataataatttgattttatttgaacagtgagtattatactactcagtctagagatctgtgacatcccagtctaaactggatgatagcaatgaagcttcttcaaggagacaactatgagtaataaggtagaaataagttgaatttctatggagttgctacttctgaatttaaagccagctgaggttaagtagatattcaaaaagattgctgtaatcttcacttgaataatataaacatttattatttttacatatttctttatttatggaacatagatgtaattttaaaacagaatatttgcaaattgtattaaaatatattaaaaacataatatattatgacccaatagagtttttcaaagtaactcagtgttagtttaaaatgtgaaattcaatcaacataattcaccatagaatatagtgtgtatgtcagtataatgtatataaaaattggaaagaagtaaatttatctttgttttttagtaagatgaaattaaaattttagggaatttcaattttcattttagattctggagggtacctgtgcaggtttattacatgggtgtattgtgtgatgttgagatttggggtgtgaatgaaggtgtgagtgcctgtcttgagtttgcacccagagcaatctcccctgatcagcagagggtaaactaacttgaattacacttgaatttcttaggagagcaggtcacaaagggcaaattgtggtccagagacaaaagtgtccaatggtctaaaatgagtctgccatatcacttagggtacaggtcttaacacaaatacatttcagaaaggggtcaaacccttgtttaaagataaatgtaagctgggtgtggaggcacccgtctataattccagctactcaggaggctgaggcaggaggatcccttgagttcaggagtttaagaccagcctggacaacataggaagatcccatctcaatttttaaaaatgagaaaaaaatagataaacgtaagcatattaacattttaaagagtttaagcaaacagagattcatggatcagccagctccaaactgaaagtggttggaggatctactggaggcatttgtagggaaggcttttatagggtgaatgtagaagtagagtagagaaattatttgtttggcaaaaatttgggcagttgcattattggaactatcctggtggtaggtctctcattacacagctaatactcagcggtccacttgttggtgggctaagcttgtttcattttgtctacgtaggaaccctggccatgggagctatctcagcctaatgctctcccattatgttattttacacctctctgtaacagcgtaagcgcggatcttccccacgaggcttctttccaccctctttccctcagcaaaatgaaactgtcccttttgcctctgtaggcaatcttctgaacagggctttcctaatattcttagctcatcttattttatcttatccttttctctgtaccttgtttacatgcttctggaacacttgtgtgtcttgcacccatcccctgcattatttaggcaatcctaaaagaagaccgctaggatggattggtagagaactgctggcatattaagccctctttccttgtatctagaactttcataattaccttagttctccaggccaattttgcaattatcttcgttctccacttcaaaatacatttacctctgacagaagcagagcacataaaagatatcttgtccagtggtacatatgaggcaggagacatgatatagttaaaattataaactaaaagctttctgacaccaaaagcataagtaacaagggaaaaaaacaagtaaattggacttcaccaaaatttaaaacttttgtacaatcagagaacaactggcagaatggaagaaaatatttcaaataatatatttgataagggatcaatatgcagaatatataaagaattcctgcaacacaacaataaataaacaaccctattaaaaagtaggcaaaggacttacatagaaaatttcccaaaaaagatatacaagtggccatcaagcacatgaaagatgctcaacatcactgattactaaggaaatgcacatcaaaaccatagtaagatagcacttcatacacattaagatggcaatcatcaaaaaagcagggaataacaagtgttggtgaggatgtagccaaatcgaaactcttgtacattggcagtggactctacagtggtatagtcatggtggaaaagagtacagtgcttccaaaattaaaaataaatggaacataggctggactcagtggctcatgcctgttatcccagcactttagggcaccgaggtggccagattactaagtcaggagttcaagaccagcctgaccaacatggtgaaaacctgtctcaactaaaaatacaaaaattaactgggcgtggtgctgagtgcctgtaatcccagctactcaggaggctgagacagcagaatcacttgaatcttggaggtggaagttgcagtgatccaagagagtcagactccatctcaaaaataaataaataaataaataaataaataaataaataaataaataaataaaaatgaaacatagaattactatatcagtcaccaagtccacttctgggtttaaacccacaaaaattgaaagcagggacttcaacagatatttgcaaattcaggtgcatagcaattttattcatgatagccaaaaggtggaagcattcattgacagaagaatggataaacaaaatgtggtacagatatacagtggaatattacttagccttaaaaagggacattctgtggaatgtggtttgaaaacctcttctgtaaggtgttgtgtaaatgtacaaaatccaaaccaggttaataacctcaaaatataaaatttaacttataatattaagatcctgataaatttcactctctgcttcatagcaaataatttattttgaatgcagatatattttgttaagtagaagactgtgcactaaaatatagtccttaaacaaaaatcctatgtataaaaccacatattttctattgatttgcattttttaaatgtaaaaatggattcacatttctatgtgtaaaatgccagactcaaagtacttttactgttaagattgcttgtcttattactgaggaggcaaaccatactaacccagaatcatggttttgtgaccatccattttaaatataattgtctctactatttctaagtccctgttctgcaaccctgtggctcttttaaatttgagaaacagttttgatgggccctgtattgagtattattatttcccagaggtactattaatagtttatggccagaccatccatccctgagtttccattaaaagaaagatggtctatggcactgcaactttttcccatcattgaccatctgcccttgctcctcaggagctccccgtgcctccctgtgtatgtctatccctgcaaatgccaaggatatggaataagtgagcctactgcccctgtggcactgcagggggactccttggtgaagtgtctacatctatctgatgtctcctcacttcttcaatctgttcgctaatgtagaattaggtcaggcacaagctatcacaaaaaaagaaacatagagtgtttgatgtccacaaatgtattcactgtaggtaacttagaaatacatatgcacaaaatccgaaccaaatatacaccctaaatatcaccactagcaacaactattttggaatacttacagtactctcattattattttaattagtcacttgtgatcttttttacttaaaacttaaaaactgagtactaaaggattttttaaggtacccaactggtagaaaaacctaatctactattttcacaaaacttcaacacaataaacacttattgcaaaagcggaagcattccctttgaaaactggcacaagacaaggatgccctctctcacgactcctattcagcataggattggaagttctagccagggcaatcatgcaagagaaagaaataaaaggtatccaataggaagaggggaagtcaaactgcctctgtttgcagatgacatgactgcatatgtagaaaaccccattgtctcagccccaaaactctttaagctgcaatgtcagcaaagtatcaggatgcaaaatctatgtgaaaaaatcacaagtattcatgtacaccaataatagccaagaagagagccaaataatgagtcatttcccattcacaattgctacaaagaataaactaccaaggaatagatcttacaagggacatgaaggacctcttcaaggagaactacaaaccactgctcaagaaaataacacaggacagaaacaaatggaaaaaaaaaaagtccatactcatggataggaagaatcaatataatgaaaatggccatactgctcaatgtaatttatagattcaatgctattcctatcaagctactattgactttcttcacagaattagaaaaaaaaccactttaaattccatatggaaccaaaaaagggtccatgtagccaagataatcctaagcaaaaagaacaaagttggaggcatcacgctacatgacttcaaaccatactacaaggctatggtaaccaaaacagcatggttttggtccctaacaaatatatagaccaatggaacagaacagagacctcaaaaataataccacacatctacaaccatctggtcttcgacaaacctgataaaaacaagcaacagggaaaggattccctatttcataaatggtgctgataaaactggctagccatatgcagaaaacagaaactgggccccttccttaaacctcatacaaaaattaactcgagacagactaaaaacttaaaaccacaaaaaccctagaagaaagcctagccaataccattcaggacgtagggatgagcagacttcatgactaaaacaccaaaagcaattgcaacaaaagccaaaattgacaaatggaatctaattaaactaaaaagcttctgcacagcaaaagaaactatcatcagtgtgaactggcaacctaaagaatgggagaacatttttgtgatctacccactggacaaaggtctaatatccagaatctacaaggaaattaaacaaatttacaagaaaaaaacaaccctatcaaaaagtgggtgaaggatataagcagacacttctcaaaagaagacattgagggctgggcatggtgactcacacctgtaatcccagcactttgggaggccggggtgggtggattacccgaggtcaagagttcaagaccagcctggttaacatggtgaaacaccgtttcaactaaaactacaaaaaattagctgggcatggtgatgtatgcctgtaatcccagctacttgggaggctgaggcaggagaatcacttgaacccaggaggcggaggttgcagtgagccgagatcgtgctgttaactactccagcttgggcaacaagagcgaaaatctgactcaaaaaaaagaaaagggcatttatgcagccaataaacatatgaaaaaacgctcatcatcactggtcattagagaaatacaaatcaaaaccacagtgagataccatctcatgccagttagaatgatgattattaaaatgtcaggaaacaacagattctggcaaggctgtggagaaataggaatgcttttacatgttggtgagagtgtaaattagttccaccattgtggaagacagtgtggcaattcctcaatgatctagagccagaaatactatttgacccagccatctcattacagggtatatacccaatagattataagtcattcttcctataaagacacatgcacgcatatgtttagtgcagcactatttacaatagcaaatacttggaaccaatccaaatgcccatcaatgatagactggataaagaaaatgtggcatgtatacaccatggaatactatgcaaccataaaaagaatgagttcacgtcttttgcagggacatggatgaagttggaagccaccattctcagcaaactaacacaggaacagaaaaccaaacactgcattttctcattcataaatgggagttgaacaatgagaacacatagacacatggaggggaagatcacacaccagggcctgttgtggggtgtggagcaagaggagggagagcattagaataaatacctaatgcatgtgcagcttaaaacctagatcataggttgataggagcagcaaaccaccacggcaaatgtgtacctacgtaacaaacctgcatgttctgtacatgttctgtcccagaacttaaagaaaaaaaaaaaacaaaagagagaaaatctcttaaaacttcatagaatctctaactttattaatatagtcagcatacaacaaggtaatcataaaggtaacatgagaaataaaatttcatgaaagcatatgtttgtagaaatagcttgtttcaggaaaaacatagtcttatttttaaaaaatggtctcataatattttatggcataaaatagcttcttttctgacagccatgtatatctttacaaaatacacatagtaatcaactaatagccaatcctcatcaggatcaatgaaaatcaattgttaaagtaatataaattaatacacatttattagggaaattccatgaattatcttttggataaaactatctagtctgtaaatggatcaggtttagtccgtttacagggtaggtactaaggccagaaacattcaagagagagattcggacttcagaaagacgaacttgagagagttcgctgcagagcataagtactaattcaggactagtggaataggatagcatacaaaagacatggggaagaagagagtatttgtttccatgcatgcatgtattgatacaagcaagcttccatcaaaaaatgactttcttctaaaggttcatatggcattaacattaacacttttcctttactgcctcacagatcagcttttcctccaaagattctctttctggaaaataaagtccagaaagagaaatatttcattgttacagtcataaaaattatacttattcactaatgctgcagccagggtagaagagagagaagttccaactttagccatactttcatcaacttttccttctacttttaaagacaagcatacagcaatgaaagtgagtgttgttattctggagaaattctcttaaatttatgaaagaacaaattgctcataattatgagattttgcaatcagtaatacatttcttattatagtttttatcagtgtacctcaacagggaaggttgagagtttctgctcaacatgataccatattacagtcatgcgccccataacaatgtttggtcaaggacagacttgtatataagatggtagacccataagactatcttattgtattttactgtaccttttctatgttgttgcttgtttagaaacacaaatatctaccattgtgttacaattgcctacagtattgagtaaagtaacatgctataaagttttgaagcctaggagcaataggctataccatattgcctagttgtgcagtagtgggctgcaatttaggttagtgtaagtacactctatgatgtttgcaggaaaatgaaattgcctaacaacgcatttttcagaaagtatctctgttattaagcgatgcatgattttattccgcctcccttcttactcacctgactcctcattttttcattttccttgcttaactcatcatttgtcaattcttgccagttcttactcctctgcagtgtatttaacattcatcctttcactatcatttccattgtcatgtctcatatttctattctctgtcatctggaaaattgcaaagtttccatgatatggcacattgtggcctgagaatatttatatgtacattttccacttctattgcactctttcatgaaattcaatgaccacagtagttccttgttcaaaagccaccaatagctttaaagcacttatctaaaagtgttcaagtagcctggtcaaatatcaacatagcttacagtgatttcactcttattctgcaaaaaggttatgatttaatctggacgtatcttgttctttcctgattcttatcagaccatttcttctgtcctctagaatatagatttcatgtggccagaaaatttttctgttttgttccctgttatacttatggtccctaatgatgtgtaggcatttaacaaatattaatagtgaaaattttttaatgaatcagttcataagtacatgaatatttcaaatagttttgtccacattttttaacctctggaaattccccactttttattttttaatgccgttgaccacagtgagtggtttggtctcatcataaaggaagatggattagaatgagtaagaattctttgatgagttttaggaaattggaaagatgtcctgttattgtttattcaacaagtgcttactgattaactcctgtgttcaaggacctgattccgttgtttctatctttaaaggcctcaaaatctagaacttgaaatagaaagaaaacctacttaggacatattgcttatttcaatattttgatatttaatcataaaataaaatgaaaaaacatagaagtcagttattttatttacttgaatacattggagaatctctgaaaaggtcactcagaagccagatttgaagaacgagttgaaatttactggagacataaatagaggaagggaacagttagaagatagcccatgagtggatttaagaattttcagatcagttgtggtggctcatgcctataatttcagtactttgggaggctaaggtgggaagatcacttgaggccaggaggtcaagaccagcctggttaacagagtgagaccccatctctacaaaaatgaaaagcaaaaaattagctgggtgtggctgtacacccttttagtccaagctgttctagaggctgaggtgggaggattgtttgaatccaggagttcaaggctgtagggaaccatgattacaccactgtactcccccaggctaggtgatagaacacaaccctgtctcttaaaaaaaaatatgactttgaaacattatgataaagtcctgaaagtgctcttagttgcccatccatttgcacaatggaatagcatgtgctgtgataacagaagtgtagggtgccatgagagccaattggaagatcatcatacctggattataggaagaaataagggaaagcaacaaggaagatcagggaaagtagaagctgacacattgcaggtgactcaaacgtaagtgggtgaagaaagaataggtaaaggtctacttaaaaaaaagaaaataaacagcatcaaatttaagaagttatacaaatttattttaaaaagcaagatatatgagggtaacaataacaataaaatcataaatcataaaaaatataattgcaaaatcctgactggattgtttaaaaaagaaacaataagaaaatagatgtttcaataaaatttaatcaagataaagtacacatttaaaaattagaaataaagcatatgacaacagacgtgaagatatttaaagttgatactatgatatattaatattttaagtcttaataaagtagataatttaactttaataggtgaacatagcaataacaaagtagtatatactaaaaaagagtaacttttctccaaaaaaacttttgcaagcaatggacttacagatttccttcaataatcaagaaatgtgaaacgtcaacaaaatgttcaatgacatacaaaaatggggggatccaaatttttaacaaaacttttgtaaatcggatatataatctgataatggcaacagtgaagaaaattacagaacttctttcagataaacatggaaaatcttagaaaaacttaccaatatgttaataggaagtaatatgaaaatcagaataaatatcataaaattattgaacaaaactcaagattgatttctgattaaaaagaaaaatacagttataaggaaaagtagaattactaacatctaactaatatattaaggatgtcaatctaaaatttgctaatagcatcatatttacaaaataataactattaacatgagaaggaatgtaagatttaataattagcattatattacaattctgggaattctgatcaatgcaataaaatatcaagcagaaataattaatttgaaagaggtgataacatattatttacaaatattacaagtaaaaggaaccttaaaatgatcattttctataatttattatagtaaattgttaaagtctaccttaggaaaataacactaagagaaaatgttaacaaaaatatctttggagttatttatgttaacaaaatttggaaaagcctaaatatttagctagaaggaaacggtacattgatatagactggcattaaacttagtttcttgatttgattaaacttagtttctatgagacatttgtatcattcaaagttgtatgtatagacactgactgaaacacaaagtgggttataatattgaatatgtgatataatggcaaccatgaagaaaatatcagagaatcaaatggaaggaaaagagcagaacctgaataatgattacctttggacagtgggatcttagttccttttactcttcctactaatttaaaatttgcaaatttattaccttgagaatatgagaatacattgtatttataatcagaaaacataaaatgagtgctaaacaaacaaatataccaaattctgtttagaattcacttccccaagaaactttccttgattaatcccactggcattgatcattattttatatggcacccccatacttatgtattcagtttctaccatattaatttgcatgttttaaaaagtcaatttataagcataattatggcatttctacatttatatagtgtagtctccaaactgaattataagcttgaggatatgaggaaccacagtgtatttccaactatatttatacaataaatcatgtggtacttttcacagagtgaatgttgttaacttactgaacacctgatgaaacatgggaaagatggcaatgtctcacaagaggaacagacgtgaaataaaatccaacattctgtataattcttagtgtctcttaaccctacttgttgaattacaaaaactacatatacaaaaatttgagcattgtactctttagctgtacattatcatttcaaaacaaacttatacatggctctcactattacaataatcttcccactgtaaaaacttttaagctgtaaatttctgccattactacattaccttcatattaatttatgccatacttctttctgagtttctgtcaatattcatctcaagtatttttgtgtaaaaattagatagtaacaggaaaatagataactgcttctagtaggtagaagtcattactacagctttgcctattaacacatacacactatttcttcatgtcccagatgttcaggtatatgggaatgaaacaaattaatgagttggaacctcttgattcagttattctggtgacaaaatctgtatagctcatggacgattgttttacccttgacaaagtggctgcaattgttacttacagatgtagccacatttaatttcttttctccactccccactgcattgtatttgttattcttgatatgagaaatgtgttaagaaacatgctactaactgcatgtgctccccatacaattagctacagaaagaggtgataactcatattatttacaaatattacaagtataaagaaccttaaaataatcattttctataatttgttatcaattgttaagtttattttaacaattatcaattagctacagaacacgagtagtgtttcttactttagccagatgtaaacatgtgatgcggtaatatagtgaagaatattactcacttcaggggatagggctttagtcaagaattttgagaaactcttgaaaaaggaaaagaaaactctccatgatagtaatacaattctaaaagcaaaaggagaaaaaatgtaaatgtattaaatcgaaaaatattttacggtaaggcaaaagtgggtatagaatggtgagtcacacacaaattgtgaaagtgagtaatgacccagaaatcaaaggagagggaaaaatatggtaggtgaatatggttgcaatgctaattaaaaaatgttattagcgactagctcaattcaagttttgaataaatagaaatagagtgtttataatggtatgcttaatatactggtgacattattaagataattgttgaaatatacttaaaagaagttagtgaaagcagagaatgaaagactattgaacttttctggtttgttgtgtaaaaatttgcctatatccaacatacaggcaaaaaaataaaatactggaaatagagagcaaatcttggccattcaaatgagagtcagctattaattctttggtcataggctgtattcctacaagcaaactttggctaaaatatgcgattcaatacagatactcatttttcaactgtttacaacctgtttgagtccatttggactgctgtaataaattaccttagactgggtaacttataaaccaaatttattattctcagttctgggcgttgggaagtccaagatctaggtgcctgcagagttgttacctggtgaggtttgtttctcaaacttactgctacatcttcacatggcataagggcaaaaggggcaaagtagctccctatgggttcttttataaggggactaagccattcatgatggctccccaacccccttaacctactcacatcccaaagacctcccctctttatttatttatttatttatttatttatttatttatttatttattttttgagatggagtcttgctgtgttgcccaggctggagtgcagtggcacaatctcagctcactgcaacttctgcttcccagcttcaagcaattctcctgcctcagcctcctgagtagctgggattacagtcatgtgccaccacacctggttaatttttgtatttttagtagagatggtgttttaccatgttggccaggctggtcttgaactcctgacctcatgatctgtccactttggcctcctaaagtgctgggattacaggtgtgagccactgtgtccagcctggcctcacatcttaacaccaacatattgggaattagatttcaatacatgaaatttggagagatttaaactttcagcccacagcacaaacaaaggatgaatgtttgaggcacctgtcaaaatacacatttgaaaagatcagaatgtctgcaacgtcaaatgaattacattagtagaggcaaattctaacaatgaaatgagaagaactgcaaacagaaagaatcacagagagaaccatctaattttaacattgaggaaaaactttgaatgtgggttccattcaattgtacaacaactcaatgtatacagcgtcaacacttttgaaacattgagataaaatatttttggattttatcaaatttgatgtaatgctagaagaagaattcatactttgaagggactgtgataaatttaaggatatatttacttctgtttgcacttgctacatgctgtttccaatatgaatattttcacaagatttacatgtctaatacatgagttggctcctgaccttgaagcaattgttagcaatagatacacttgtaaaaaaaaataggacttctgctgtcctgcatgaccatggacatgtacatcttagtatttatgcataataaaaactttcagttcagcttagtaaatatttattgacaatgtgctaatcatgaggaggactgtggataaaggtggatgataaagataaatttaagttgggaaaactaccaccactacatctacaagggctgaaagtatatacaagtcagaagcacacagaaatcactgaaccacaaagtaaatggccgtaagtgctgttatatacccaaaccatgtcctacttatatagtcctttaaatggataaataatacattaaatctgactgggaaggaagaaagtttctaggaatagttctttaaaaagttgcatcagttttgattaatacatagaaagagactgttacagaagaagagctagctaacggaagacctagcataattttattcttgcacaatatcagagaacccaacagttttgtcagcagtagctacttttaatttatttggatacctgagatcatctgggaagactgtggtaagtaaggctgctgatgaagactttgattaagaaaggatttatcaggagctgggcacagtcgctcatgcctgtaatcccagccatgtaggaggatgaggcaggaagactgcttaagtccaggaattagagattaacctgggcaatatagccagaccaccttctctacaaaaaataaaaaacaattagatgggcattgtggcacatgcctgtggccccagctattggggagactgtggtaaaaagatcacttgggaccaggagtttgaggctacagtaagctatgattgtgatggcagcggctgctgccaacacgccagctgcaggggagaggtgtggccggggttgtatgctccctggagttggcaggatggggacaagtgggagccctgccctttctgagttggaatgggagctccctgggtgctgctgcagctgcccaaactgcagctgtagctgtagagctggacctcccactccatggagcagacaggagtttatccaactcccctactctgtccccaccccagcccaccacccagccaaccaaaccaatgctgcagactcaggcaaccctgcactcttggggaggctgggaatgacccccttgccccttgcaggcttggaggctcctcctcctgctgcctggtctctcccacctcctggctctgtgctctgatctcagagtgggtttgggacccagcagggtgctgtcacagcccagccaggtgtgcacacattggaagcagtgctgacatgccagtcccctgccacctcagccccctctggactttggacaccgaggagcaggaacatgggaggggaagctgagggggtccgagggtggctgggcactggcctgcaagtgccctttgatgccagaagcctgggtgccatggatggctgtgggaggcagacaggctcctgggtggaagggaatgggtccccagtgaagccccacctgcaggctaggctgccagtcctgcagattggaggcaaaactcatggtgctttttcctgggcccgcccatggctgcccatggaccaatgggcatacacttcctcccctctgacatccataaaagcccaggactgagccagaacagggcagaagacagaggagggaagactagaggcaggaaggagttatcctttctgctgatagctggagacaatgggagggccagctactttctctgcggaatgcttcagagacctacagagatgtctgggaactaacagctgcagatggaagcaaccctctccagggcttccctttctgctgagagctgaacacttgacagaacaacctagagaggagctacccactatgggtctcctctgagctgttctggcacttaataaatctcctctcctttaacccttcacttgtctacctacaccattcttcctggatgcaggacaagaactcgggcaaagatgccaccaaccacagttttccaacaagaaaatcgacaccccaaagattccataacaattgcaccactgcactccagcctaggtgacagagtgagaccctgactcttaaaaaaagaaaaaaaaaaagaattatccacaagttattagataagactgctaatagtttctaattgcgataccttcccgtttgaaatggaagggatggaagttaacaccaggtcagttttctgaaagttataaccctgcttttggcctctttcagctccagtcagacattagcaattctcagttaccttcaatattaagccggtcctgacatgaaactggcagcatttgagaacactgacccagacttgaaggtagatctggaattaggattgctgctttaagcccagtatcaaggtatacaatgaatcatgaatttctcataaacgaaatttagtggatttttttcctatatttctgctgataactttgcctggattatatatttaaacaattcatttgctgtaacttcattactgtcccaaatgttttgggttgacatactgatgttagctagtggttttggtcttaagtttcagtagctgctccaatgtaaaatgatcacacataaatcttaggtttttactcatatgataccttgtctgatactatcttcatctatcaaataaaggttttagtattttcttagtcaatgtgggctgctataacagaaaacacagattgagtggctaaaacaacaaacatttgtttttcacagatctgtaggctgtaaatctgaaatcagggagtcagcatggttgggttcttggtgaaggctgtcttcctgacttacagatggctctcttattttatcctcacatggaggagagaaaaatctctctcgtatatcttcttagaagggcactactttcctttgatgagggtttcctcttcatgacctaattacctcccaaaggtttacctcctaatgccaatacattgagagttaggatttcaacgtatgaatttgagggatttgcagttcataataactatcaatgtcaactcagttcaagtttgaatttgttttgctttgggtgacaaatctctaactaatttgaattcatctttccccagtctggttcaatgttgtcttctttctccttcaccaccaacagttagcaagatgtcaattttacttgaggctaagtctgttttagttatcacaatagagaaccctgtaagctatatgttagttgcccctttcataatatttttcattacggaaaaaatacattctaaacattgttcctattctaagaaacttggctgcatctttgcaacaaaaataatgtggacctttgccaaatacagctgtagagaaaggtaaaatcattgctctgaattattcataaaatcacagaaattagggacaaacactaaataaggatgaattattcagtgacttgaaacagatattttctttattttctcatgtaatttgaaatgtactgcaatttacatcctcagtgttataaacatgtgatgtttcacttttagttaaaagcacccaacagaacttgttaaataaatgagttttttctcttcccatctctaaaagcatttttatacctactcatctacaaatatgttttaatagacctaacctctctatgatgtcattttccccttgggtaccagaatatatatttagtcctatagaatgatttagctctcaggttctgagttactatttcccaggagttgcattgcccaaagtaatgtggacatttttctcattttaaatttcaactcacatggtcctttggttttgttacattttgtacctgttttgattgtttttttcctctctatggaaattatttgccaaataaggagaaaaagtgttgatgtttttccttattcaaaaattatggtagataaaaaatctgattaaataactctattacagtctttctcaaatttttactaagataaacatgaaggtactgaaaaggtgaaattctcagctattgaaaatttggaatgtaggacatcatgccgagatttgaggaaaagtatcaataatttagcaagggatggtagtagatatacaaaaagcaattagaagcaataaggccttggattcttttcatgttaaagaaaatacattctgaaagtaagtacaaagaccctttgtatttcctttataacctgttccctaacagaataccagggcctatgccaagggaaaaactgtgtagatgtgtttttctcttctggtgctgatatggtcataggatggggacgctcgctctttgctatttctctaaccaatcgtattactacatcaattaatatcaaaacatttcaagtctagttactgacaacagagtaaactagagtggactcctgactcataacaaggattcagatctagagttctcatagagtgaagaaattatgtttgcaactgagaaacgaatgtaaaaaccgtcaggaatccctggagagtctgaaagtccctgagccctgatacagagagcaaatggcagtttaaggctgaccacctctcattccctccactatttctcacataagaatatacagtacactcttcactgctctctctgcttcaagctttgcccttccacctctctatcccacagagaaagtagaatgctcctcttaaaatacaaggtagattattttacttatctgcttaaaaacttttcaatggcttctcatctcattctgaataaaattcaaagtgctttccaggtttacaagtccctgtatgatcctgagccttgacaatatctctgacaaaatctgcaacctcccattgatcactccttctctgtcacaccagtgtccttgctgctgttttgaaatatagaaagcatgattttacttcagtgtctttatccttgttattttctctgcctgccttcttctatgtattgggcattccatatgactcatctcctcattccccttagtcctttttccatgtggcatttgaatacagaaatcttcactatctaaaattatactcccatatccataacttcttttattgctctagatatccttacagcatttatcattaccacttattagcttatttgtctttccttactaaaatgtaaactaaatacagacagaaatttttgtaattaaagaacacataacaaaaaaatctaccatcttaacaaaattttaagtttgcagaacattttgttaatgatatacacgttgttgtacagcagaaatctagaatgtttttatcttgcttgactgaaactccacacctggtgaacagcaactccagatttcctgtttcctccaggccctgacaactaccattttatcttctgtttccatgtgtttggctactttcaatacctcgtataaatggaatcacgatatatgtgtctttgtgtctggcttatttcacttagcacaatatccttaagattgacacatgttgaaatatgacagaatttcccttttcaaggctgaataatattccattgtgtgtgtgtgtgtatatatatatatatatatatacacacacatatatatatataccatacatatatatataccatactatatatatcatacatgtatatatatcatacgtatacatatatatatatatatatatatatatatatatatatatatatataccatattttcttcatctgttcatttgatgatggacttttagattgtttctactttttggctgttgtgagtaattctataatgaatatgggaatgcaaatatcacttcaagatcttgttttcaattattttggaattattcaattattttggaaaaatgcccacaagtgggattgctgtatcatatggtaggtctatttttttaatgttttgagggccctccatactgttttccatagtggctctaccattttacattcctactgacagtacatagggttctaattcaatttctccacatcttcatcaacacttgctattttccttttttaaaaaatggtcatacagttatgaggtgataaatccttttgtgattttaattagcatttccctgatgattaatgatgttgagtatctttttatatccctgttggtcatttgcatgtcttcctgaaaaatatctatttaagaatttagccatttttaaattgggttatgtgtttatttgcttttgagttataggtgtttcttatatattttggatattaagcccttagcacatatacagttttcaaatattttctccaattctgtaggctgcctgttcactccattgtttccttttttgcacagaagcattttatcttgatgtaatcaccctaacctatttttgctttggttgcctgtgcttttggtgtcaaatccaaggaattattgccacgaccaaagtgataaagcctttctttatgttttcttgtaggagctttacagctttagttcttacatttaagtgttcaatccatttggagttaacatttgtgaacagtgtaagataagggttcactttcattcttttgcatatggatatccagttttcccaacaatatttgttgaagaaattatcctttctgcattgtaaagttttggcaccctcgtcaaagatcatttgactatatgcaagtgggtttatttctgggctttctttctttctttcttttttgagatggagtcttgctctgtaacccaggtgggagtgcagtgttgtgatcttggctcactgcaacctcttcctcctgggttcaagtgattctcctacctcagcctcccgagtagctggaattacaggtgcccataaccatgcccagctaatttttgtatttttccatagagacggggtttcaccatgttagccaggctggtcttgaactcctgatcttaaatcatccccccgccttggccttccaatgggctttctattctgttccactaatccattatcttccattcatctatatgattagttttacattaatatcacactattgggattgctgtagctttgtagtatatttcaaagtcagaaaatgtgaggcctctaactttgtttttctttcttatgattgttttggatattcagggtccgttgtggttccatatggattttaaaattgtcctttctatttctctaaaattagcattggaatttttatagggattacatcaaatctgtaaattgctttggctagtattagaatttgtaaatattctttcaattcatgaaaattagatggctttccatttacttgtgtcttccttaatttctttcagcaatattttgcagtattcagtgtacaagtctttcccccaccagctaagtttattcctaagtattttattcattttgatgccatggcaaatggattgttttcttaatttccttttcagaatgtttgctctttgtgtttttttgaatctttactttgaatcctgcaactttgttgaattcattttattagttctaagagctttttgttgaatctttaggggtttttttatatataagatgatgttttctgtgaatagagaaaattttacttcttcctttccaatttggatgccttttatatctttttcttgcttaattattttagctaggactttatgtacttcataaagtcatccttgccttgttcctgatcctgatcttagaagaagagatttcagtttttcttcattaatatgatgtgagctgtgggtttttacatatggcctttattctgttggaataatttccttctattcctattttttcaagtgtttttctaacgacagaatgttgaattttgtcaaatgctctttctccatctacagagatgaacatgttattttaattgttttgttaatgtggcatattatattgatttgcacatgttgaacccttcttgcattccaggaataaatccatcataattatggtggatgatactttatagtgctgttgaattcaatttgctggtatttgttgaggattttgcatctacattcattaggaatatttaacttttttttcttgtagcgccattgtctggctttgatattagggttgtgctagcttcacagcaggagtttagaattgttctttcttctttaattttttaggaatgtttgagaaatattggcattaattcttccttaaatgttgacagaattctctagtaaagtcacctgtgcctgagattttctttgctggaagatttttgattactaatttaaacaccttactagctacagatttgttcatatttttatttcttcttgattcagtgttgtgggttgtatatttccagtaatttgatttttttctaggttatccagttactaccataatcattcacagcagtctcttataatcttttcttatttctgtggtatcaattgcaatgtctactttttcattttttattttatttggttgagtcttttttctttttaattgccatattccattgtatagtaataccacagttttttaaaatctattcacttgcattggttctactttctggttataatgaaaatatgtgtgtgaaaatatcctttatttgcattaatctttattatttccttccttttgctgggtttgggcttagttctccttttttagttccttgagttgtaaagttaggttgtttatttgagatccttcttctttcttaaggtaggcatttattgctataaatttccctctttagtcctgcctttgctgcatttctaagttttgttatgttgtgttttttattttttttttgtcagcttgttttctaatattctttttgatttcttctttgactcattggttgttcaattgtatgttgtttaatttccatatatttgtaaatgtttcagttttccttctactattgaatttttgcttcatcctacttttggtcaaaacaggttcttgatttcctttgtcttaaatttgttaaaatttgttttgtgacctaacatgtgatctatcctggagaatatgtcaggatatgtcactttgccagataatttatatacctccatttttgaagggttgatatttgaaacttattttgttccttttattgggccattttcccctgtttccttttgtaccttttaattttgtgctgcgattctaggatttgaaaaaaataaccacttctctctgtctttacagactggttttgcactgggaaatcctttcaccagtcagcccagctagagattctgaagtgtgtcaaatctttccgtgaatgtattgtctctggaattgtgtgtaaattcttagaaaaatttgcaggtctttcttcaggagcgtgtaatctcttgctctctttgttatctatctgtagtactgtagattatctggagttgctataaccccctagctctcttttgttctcagcagtcctcagacatcaagagtattcggtcagacagaaaacagtccatcaggctgactgggaaaagttggaattctggatgcacactccagctttttccttctccaaggggaagccaggagttgagggttttctcccactcattgcatattgatccagggaaggatagtatgataagtgaatgtatgctaacccaaactgcctcaactcatttgttcttaatatccacaacctggaaagctttcctgttagcacttaaattcaggcaagacagaaaacaatcacttggcaactcccctgaagtctgaacactgaatgtgtgcctctgtattctctttcacttctgtgggggaatcaggaactgtagagtattctcccaatcttgttatactgagtcacaggaggaatgatggtgattgagtgacagtccaaactgtggctttatcagcaggcatgcaatctggcatcctttcctgttagcacttagattcagggtagataggttctagtgccttcccaaaaagtcaaaatgttggacatatggtctagaattttctttctctccctagagatgagctgggagtttggagctttctctccattgcgttgtactcctgagggaggatgagtgagtgcaacaaatttacctgctggtttagatgtgcctggcttgaagcctaccagggaatccagagtctttaaattcgcctctgtacttttcacaaacgggatttatctgtgtattattatcgagctggtgtctccttggagaggagtgtggaggggctttgaggctttctatttcatcatcttgctggtgtcctgacaggaattttaaactgggctcctttccccgcagtgtgggagaatggatcctggctgattataagtactcatgaaatactggataaattattatttatcatttacttacaaatatttaaaatttttattatgggaaataagttttcaatcactactaaagtttgttgaagcactacttcattactgtgaaaaatggggaggggaataaaaatcaagcatttgtctacttatcttgttttcctgtccaaactgtgttttggtgtaatcaatacacatttgggaggaaatgttctcttagaaattattctagctaataaatgaagaaaaaaatgaaagaatgtagtaccctcttataacacctagtaaaataatggttgaaacaagtttcctaatgaatgctaaaaatattaggtgaaaagttgatgcaaacctttactgtggtggaatgtggctgacattaatttcttatctgaattacatttttgaaactttatgactgaatttaaaagggattttggtgtcattattttttcttttacactctcctttttcacataaaaatcaactattaactgattggttttatggtcttttggaaagagactatataaattctgctttttgtatgaagatctcttttacactgtcagaagaaattttacctctggtaagctctgatttcatccttcaattttattttgaatttctttctttgtcttttgttttatcagcaccttgtttaatttaaaatagattcaatgtcaacagtcaaggagttaactcaggaaactaatttatccagacatacaaatatttttgcatatattttatcctttgtttcagatctttaatatgtaatttctaaaaatgaaatatggacagtttgcttgatttctgagcatagtcaatgaataattttaccaaaataagcaaacatttttcgagcttttttttttccttgagactgagtcttgctctatcacccaggctgaagtggggtggtgtgatcttggcacactgcaacctcttccttccaagttcaagcaattctcctgtctcagcctcctgattagctgagattacagttgcccaccaccacacccagctaattttttgttttattttattagagatgggatttcaccatgttggtcaggctggtctccaactccccacctcaagggatccgcccacctcgaactcccaaagtgctgggattatggtgtaagccacaacacccggccaagagcatttggatataatgagttactggggaaaccttttaatataatgttagacagcccatttaaaaagaatccagtataattattatattctttatatgactacatttcacagtgaagtaacttagcactctgtatttataatgctttgaaaatacatattagttgctgattttatattccaaacagaaattataggacatcatattatataaacacaagaattcaatattaatttttacactttaaaacaataatcttggccctgcacggtggcttgtacctgtattcccagcactttgggaggtcgaggcaggcggatcacgaggtcagaagattgagatcatcctggctaacacggtgaaaccccgtctctactaaaaatacaaaaaaaaaattagccgggcgtggtggcgggcacctgtagtcccgccactcaagaggctgaggcaggagaatggcatgatcccgggaggctgagctcgcagtgagacgaggtgacgccactgcactccagcctggatgacacagcgagactccgtctcaaaaaaaaaaaacttttcaatttttaaaatttttctcaaactacccatcagagaagtttaacatctccatttacagttctatgatgttatacagaaatattttattttttccccagaataatataggcaaattctctccctctgactatacacacctggtaatgttattttaattgtttaagggtttctatctcttcctattctgaatgattattctccttttgagctttcttacagtaaccattttaaatagtctgtagacaactttctagattccaggatccacattaatcttcctgccgttgcagtttctgtcttctgcaagagtctagcttttatgagaacaaaatagtcatatcttctttaaagaagagtttccagtgtaaagattaaaagtttaagttaattgtaaatgaaagactccagttagaggagaaaatatttcattttaagatgaatgtttcagaatacaattactatattgaagatgaatctcactatagccacattaattatgtctgtttcaatttaaggggacacagtaacaaatcttagctcactgaaaagaaatcaaatctgaaacatggtggagaagtatgagccctgaccaagagattttcttggaagacatagattgacttatagcaaaagatatctgaagtagtaaaatcttacactttatttttatagaaaacagacaataaaaatatttctaaattaattttgtaaaattaattttgtaaattatttttgtaaaaataacataaaaatatctgattaacttagatacataagttctttaagttccaaaataaagaatgagagaagtttatagtttgtctgacttttattcttttaatccataattaattccatagatagaataatttataatgtaactttaatcattacatcctttgatcaaaaatatacagatattcttaatttttcttctcatatttacttaaattattttccattgctttaatatttctttattcactggtcccacaatagttcactaagtttggtatttcttggttttgtaaaaaatttcccaattcaactccatagcacaatgagtactcttctctcctcttcctttgtattctttttaggtccaaccccatggctttccttttgtactctctaggccaagaatgttctttcttattcctaccatttaaccaatattcatttttcatggctgtattagtccgttttcacactgtcataaaagactttcctgagactgagtaatttataaaggaaaaaaggtttaattgactcacagttctgcatgctggagaggcttcaggaaacttaccatgatggtgggaggaaagcagacatgtcttctatggtggcaggcaaggaagaaagtaagcatgtgaaggaggaactgtcaaacacttataaacccatcagatctcttgagaacttaactcattatcatgagaacagcatgggggaagctgctgccatgatccaatcacctcccaccaggttccttcctttacatgtggggattacaattcgagatgagattcaggtggggacacagagcaaaaccatatcaatggccagtatatatttttcttttcttatctattcccgactatgtcctttctgaatttcttccatactttcaacctgccccacaaaaggcagagcttacttatatttcttatcctgttatttaaaaattaattttgcttgagtttgagaataatagtcaataggcaggggacaagcaggccatcaacagcatcctttattttggcagaaattattctgaatcaaacttaccttgtcatgggtataataacatgatctcaaaaagaattaaaaatctctatcacttgaaccacagtttcccttagcatatttaatatacttcatttttctcagctaacaaatgttagctaatatttttaccatcaagaagaatatcctttggcaaaagaatctctgtttcattagtacatattgagagagttggaccctatggcttcccaacttgatcaggaatggggaagctgggtacccagataggtaatcttctgttttgatacttatagcctgactgcacacagtgtcaaatctgggtcttgacctagcaggcacacattaacacaacatgaaggaaggaaaaagtcatttacgaaactacaatggctgcagtagttatttggtagtcctctttttaaaaatttccttttaattgaaatgaaagtttataagtgattgtagtgtaaatgatataacgttttacaatgttttattacaaaaactcaaacactccaggagtgaattaaatgtaaattgaaatctccctctctctacaatcccacatgcctcatcatttcctctattccttagaaatccaccgacaacaatttaattagaactcaaatactttcactcaaaaaaggcatatgtgtactatttaaaaaatgggattatgctaattatgatttgtagtgacctcatatttcattcaaaaatacattggatatcttgccatcatttaaaatgactgtaaattgttaatttttaccaatatttttataaaacatgtctattgaaaatttgtcattaccatctttgcattttttatacacttgtataatgaacagctttgcaaatattagttagcacacttgttcaattatttaatagagatctaatctgaggagttgagaattttcaactctttctcaggaccattcctttggagtgattttggaaatgtaggttatttttggttgtatcagtgacggagacatgaagagcacttacaagtaaagggtagagatcacatgcagcatgcactgggccaaacagtgcattgagacaaacagtcctgtagtacctcttggagaaacatggcaacatgaagtatttcactgtctactttaagaaatgttgcactatttgtgcattttacaataaatatctattcatcttataatctgcaaaacaatatactattatttaaagttcttttttgttttgttttgtttttgtttgtttgtttattgttttgagacagagtcttgctctgtcacccaggctggagttcagtggcacaatcttggctcaatacaacctccacctcccgggtttgagtgatttcttgtgcctcagtttcacaagtagctgagactacaggcatgtgtcaccatgcccagctaatttttgtatttttgtgtttttagtagagaaggggtttcactatatcggccaggctggccttgaacccctgtcctcaagtgatccttccacctcggcctcccaaagtgctgggattacaggtgtgagccaccatgcctggcctattatttgaaggatttaatcttctcccatcccaacaacaatggaatttttcaataaatccaaaaaaatatttctttgaaaagacaaataaattagatgacaaaaaagagagagcctattaaaatataacaagaaaaatggaaaactggataactgaaaatttcaaaagaatctaatatgtaccttttggtcattatatttgaaaatatatataaagaggttaattttttagggagaatttaactataaaaataaatctagaaaaataagaacatttgaagataccaacaatagaaaaaaatgaaactggtataaagttatagcacctttaaaagctcaaggcccagctgtgtctcaagcaggtcctcttaaacttaatggaaaagttaattcctgtgttgttcaaactattcttttggttaatgggagcaaaggaagcatatctctccctccatttatttcttaaaacaactgaaaaccaaaagaaaatcaacgtacaaagaaaaaaactccaccaattttgttaaaaataaacaccattaaaaattataaaccaaactatgaagactagttgtcagtgccataacaatttagcctttcttcaaaaaatggtgagagtagatgcagacacctgagcaaatatggcatgttaaacacatagagagacttattttcccacctgaagctataacatgatggcaaatggctcattcaagtgatataaaaagaaaacagcaacatttttgaaaataggatgtccataaatggctggtaactgacttagcttaccaaaaagtgcaaaattgtaagtagcggggaaatctgattctacaaaatgttcataaattggttgcacaggacacctctgaaagtagaagtaaaggtagggctaaaacccaggaagattggttgaaagactgtttccaatgcccactccatcaagcctcttaaatgcctctaggttctgctggtggaaaagtagacatttgctgtctagagaggtaacagggaatcttagtactggcaatataatcttcattggtcatacataaattaggggggcaaaatgaacagaaactactgaaagctagatctccccaattttcacctctatctagattcaaacataacagtctattagtcttataccctcagagaagactggaagactctagttggaagatcatgatcagcccaaagtaatagtccagtggatatgtcatgaggggcttttctgggaaaacttctcgacctgattgccctggctggaagccacagttgacaattattacctaagaacctggagcttaccgtaaacgtttattgtattgctcttgaacacaaacagataaccaacaatcaagagattctaggtacagccaataacaaacacggaatcaaaaaataaacaaaacaactgaaagtaaacagaatctatacagtgtgggaaaaaagtaattattaatttcctcagagagggaagatgataagatgatacaacaagaacaagatgtgatataaaatggatattcaaaaaaatagaattcttaaaaattaagaaatttattgcagaaatatataacttaatggaagatttggaaggtaaagctaactgcatctccagaaaagttagtgtaaacagagttgggaataagaaatggaaagtttaatgaattaaataattggtcctacagggccagcaacaaaatacaggcatttgggaaaagaaaaaaatacaatgaagtatgatatatataaattattttttgaaatgggtaagagttaaagtgtatgaatttcagattgaatgtgtccaccagaattcaaatcagtggtgaaaatagacctagaccaacacacacacacagacacacacacacaaatcagcacactccaggaaaaaaaaaagaagacacttcaaatttccagagaagagaaataaaagtggtcactagaagacaagcaaagccttataaattgaaaaacaaattatttctaatgcagaatagtatctccaaccaaactgtaaatcagataggaggaaaacaataataagcatttacagcacggcaagattctaaaactctacatccaatacatcctatctcaggaatttactggagaagagtttcactaaaatgaggaagtaaatgaagacagggtagggtataaagtacagggaatctcctggttgttagatgtgtggtatatgtacacagcaacctgtgtaaattagagctatctagaaaaaaaattcaaaaagataaatctgataaaatgtctaatgcttctgaatgtattatgagactcattagaaaactggggtagggtttggagttggtactttgatacatacatagaaaaacgaaaaaaacaaaaattttaaaaaattgtcagtttaagggaaaaaaaatatcgtgtagaaatgaaattcaatcatttatgctccatgtttcaggtgtgagtaacatttacctaattataacagtactagtgttactgcaaaaaggggtcctgatccacacttcaagagagggttcttgggcctcacacaggaaagaattcaaggtgagtcacagagtacagtgagaagaagacatagtttattgaaagctactgccttttagagtagggcatcctcagaaagcaagcgaaggaatgcactctctttgttttcagtttttctgttataggagttttgtctatgtaaagactaaattggaaacaaaataacaagaagaaggaatttatgcataatcttcaaatcatgaggagtaaaattcatacaggacctgtcgtttaaagagtttcatagtggttgccagtgggcattttgtgatgtttatcaatgtgattcttgaatgtaaaaaggactgcttataagatttcatattctgaattaatgtgcagcatattatattaaattgttaacgaatttaaaaaatttttgagtttaaattagaaattttattgttctatttataaaaccagtacattaaaaattatttttaaggggaactttgattaatgtttggtccatttacaacttagttaattaaactcccttaaagattttaaactacatttatacatttaatatgttcaattatctttgtgaacattttaattatcggactaacaaataaagccttcagagtacttaaacaacccttacagagctaataaattaaacccacaaaatcatgaatcttaaattatcttcaatgttaaaccattactggcaactcggtaaagccgcttataatttaaactaaaaaaaaaaacccaatatctaaaatacactgttacacatttaaaattggaatgtaaaatgctaatctatatttaaatactaatacaattataaataaatatcacatctctaaagtataaatattatagttttcatatacttcatcatctctaaactttttttcaatgttttcctgggataaaaaatttcataaaaacaattatattatcttaagcaaatggggttatcacctcagtgagttgtggctattttttcaggttgtttacctatcagagattttgactggaaaatgagatctggagcttcagatactcagggtaattgtttgtttttccctcattaatatgggaaaaaattctaacgttgtaaaagttatgttaatagagattccaagcccatgaactctaagtgaaatggccatgcaatccatgttttctagatccatgttgcctatatctttagcctgattttaatatctaacctccctactctgattgtttaggtactagattaaattcaaaaatctatttactgtatgattcttgacagagttctttttatattcttcatacctggtgaagtcataacttttctggatatttaaatgacatacacgtgtattatttaatctcgtgtatatctgattctgtggtcacatttcccaaggccagataaatgactgtagccagacagatgtagggctaggtgtaaaaggagatattcccacagattatatagttgctgtgtagagaaaacactctatgtttttcctctactctcacaccacaaagatcaatcagcaacacagaagacttctgtgaccaaatgtgtgcgttttttcctccatacatataccaaggagcagacaccagctgagtgtcctctaattcagttctgacactacactgtctacctggagatagtgtcaggtctcacaggtcagtccccaagactgcccaccctcaacctaccagccacaagcccaggcctctgaacttctgacctactggcttcaagttgggttctcatgaccccctctttgggtttgattaatttgttggagtggctcacggaactcagggaaacacttacatttcctggtgtattataaaggatattgcaaaggacatagatgaagagacatttagagcaatgcatgggggaagggagcagagcttccatgtcatccctgggtgggccaccctccaggaacatccatgtgttcaactgcccagaagctcactgaaccctgtcctcctggattttcatggaagtttcatgatatcagcattcctccctccagggtatagggtgggactctctcctgagatggtcttaagacccacaaccagaaaggcaggaacataaaaatgaaaaaaggccatgagaaggtgagaggcctgctcctgagacctaacacatccaatattataacaaaagattgtaacaagtgctaggggagttataagccaggaactgtggatgaaaaccaatatacatcataacaccacagttgctgagaaaatattcatggaaaatagacctaaattgatactgcctattgacataatttaccttactgatcttttccttcaccattttaataaatagctcagacagtaatgagtcccattcaaagataataatagaaaagacaccagcactgtgcctgtgtaacatatatttcatgttagagaaaagcaacaaagacaatataatattaaaagacagaaaaaaattatatgccacattgactatcattgaatcacaaagtgagtacaaatttttaatgcattgtttcattaaatcaaattccccttcccgcaccaatacaactcctctgatgtaagtgacctaaaaggacataaataggttttaaagcagatataagataaatgcaatatatgtagtgtgagtttagggaaagataaaagggaaaataccttttatctgagaaatatataccacactagaaacagcaaaaatgaagaatagatattttcaaaatttactcaaataaatgggtataagaaaaaaatcgagcaaaacaaaatggaaaagaataaataggtaacaagggtagaacaatatttatatttgtttgaagacagacaaagctgacctaacatgttaccatgtatattttatccagttttccaattttgtttttattgctggaaggttaatttggtcagagttatttcaccatatcagcaagtataattttccaaactcacaccccttactttttgtatcttattttttatcctattattacatattttataatattatatgttctatactgaactatacagtaaataaaaaataaaatatgaacacaacaatttcatagaaatggtgaggttttttttttaattgaggcagaagttcatgacttgaaaatagaatgatgcagtaaagaaataaactcaagaactcattttatggaaaaagtgaaaacaatttgcaacattaaaataattaatcagaacctcaatccagattaagaaggaatagagaacaaatattaaaattggaaggcaatgaaaatataatcacagatattgatcaagtaattagataagatcattttcttaattttacacaaatatattggaaaccctggattatatgattttttccatatgaaaatataagtgaccaaaatgacaagttataaaatctcagtatcttattaatgcagaaaaagatgttgaggatataaaattctgaacattctcctctcaacaaacagacaccaactcgtcatctagcattaggtatatctcccaatgctatccatcccccctcccctcaccccacaacagaaagcgcactggcatggcacatgtatacatatgtaactaacctgcacattgtgcacatgtaccctaaaacttaaagtataataataataaataagtaaaaacttttaaagaaaaaaaaatcgggatcatttgcttatgtggttactaaggcaaaatgtaagtcatgattttcctggaccagctctgaaaaaatgtcttctctggttaagactgggtaaaatggatgatttatttattcaataaagttattgaatgctcgccatgtgcaagatacagtgttgaatgtggtgcaaaatataaagatgtggaagaaaaagccactgaaaataatatgaggaaacaaaaaactagagtaaattatcagtggaataatttctattatacaagacactacacccaaatattctcctaatgctcatgtaagaatttctccaaaaataccttccagcactacaaactagaagaaaaaagagacatggataccaaattaagttcttaataatgaagaataaaagagactaccttgcctgctccagtggatccagcaaccaccaacagctgtcctctttctatcttgaaatatctttcaggacaggagtaccaagaagtgagaaattactgaagaagaggctgtcatcaccattagaagtttttctattgttattgttttgttttgctttctcaaataattccccaaatccctgttaaaaaaaaaaacacacacacccatcaaaaataaaagatgagtttgtcagaaaaaaaaaacagacaaatcagcaggcatgaacattttcaagaagaaatgtatcaagacatgaaagtactgataactcaatgctgtttaaagttttcttcttctaattctagctatgacaaattaatttgtattaggccatcccacctggcgagaacaattatgaaagctggataaaattaattaaaaataagtagctatttaagggcttctgatagcaatcaaagcatccagaacttgagtgtgtaagctctcagaaagaagagaaacacattgaattgatttcaacattctccacaacctttcatttggatacatttgctgagcagatagctaagaagaaaatggtagctcagagatgttagaaatctgataggcctgcatagacaaaaattggaattcataactatcatggtggccagggcttgataaagggccagtagaaacaaaacaatttcattttgtttttccttcacagcattttctgattctttagttgcagaaggtgagcaactaagaagcttagcataaaatggagctacctgactaaaaggaagttaagcagacctctcagcaaaaggatagacaaaattggagttcaacaaggaacagaggacctagaaatctccctaggcattgagacccctaaaaagctaatccctagctgaaaaggcaaactagaaatgcaccagctgccacaaaaactgaaatctagcctcaaggcatttcagcctgattggaccaagaggatctacctctaagccagaagaaaactacaatttctttggagggagatcccatctaaagactttttctcttaggtcaatgtctggctcttgatcataaataagtaggcatatcagtcagcagggctaaatgatgcatgcacacacatgtgcgtgcacacacaaacagagtgagagtgacagtgagagggagaggagaaatccatagctttaaatgtttccatgtaaagaaaataaaaatacttccaaatatatttatgaataaatattgtatttatactaaactggaccaaagctgaacacatgtgctctcttcccatccctttcccttcgtctctctcatatacactacacaaaataaaatacaggcctattccactaataaatattactgcaaatattctaaagctgtactttacacttaaaagttgcaatcccattaaaaccatacttcataatcaagtagtgttcatgttagtaagcaagaatggatgactattaggaaatagtttactataatttatcatgttaatagaaaaacaataatctccagaaacttcaacatatattaccaactaaataatattaatagaatagtattataatgagatagatgcaatttaatccaaaattcagaatttatgtgatggtgtttgggtacagggcctttgggaagtaacaaggtttagatgatgtcatgagggcagggttctcatgatggaattagtttccttataacatagacaccagagagcttgctctctttccctgcaatgtgaggacagagtgagagaacttgactgtctgcaagagaacgctcaccagatagcaaacattcacagatcctgatcttggacattccagcctccagatgtgtaagaaaatacatttctgtttaaaccactcagtctgtggtattttgtgatgacagttcgagcagactaagacaaataatgacaccattcatgattgttcccatctaccagtcaccaaaacaagttctaacaagattaaagaataaattcccccaaaaggtaaacttaaagcctaaaaattagaataaattgtaaataaagattaaaaatataactggagacaatcaaaaacatatatatcctaaggagattgttaaagctatatgaaaaatgtatgctaaaaatctcattggagcactattcataaatctaaataattgtaaataataactacggttatgttgattatggtaaatccatatatgtttgttaacataatgtggtaatttgtaaatgtttataaagcattcttgtatattagcaaaacaatttgaagtgtcaaattaaaaatcctgaatacaaaattacatgtaagttataattccaagtatgtttgaaaaattacatataaaaataatggaagtaaatgcaacaaactattcatagtagaattttattttacaacaactcaaaataatgaaacaaatcctctggcttacaactttcaactaggtattgtgattttcttactattccattcagtaggatacaggtggcatgtttgtattctcagtttgtcagtgttctcctggcatcattattaatagtgtccctatcactttcacaagtttcctggtttgcagaataaattatatggttatctgagatatgggaaacctaattttcttccttcttccccagtaataatctatacaattctggacaactcacctatccataaaacaatttgatctctaccttaaaatagatatatttctgctacttaacttcatagaaatattgtaaggattaatgaggagatgcttggaaaatactttgagctcatcagagaaaagtgctatgatattgccactaataaatttatttactagcttgctgagtagaaagtcaagggaaatcaagattttgtgggtatcagcgacaaaaccaaatccatcatgcatgttctggcagcccattttatataagttccccagagtagagtagctagtgaacatagaacttctccaaaaaaaaaaaaaaaatatatatatatatatatatatatatatatatgaacatagaacttctccatatatatataatctatatatataattaattagaaaaattagagacacataggctaaattttgactcttataggctattcagttagcagttatgagtaaatgtattgaacttctctttcttggtgaaaatattgtgttccatcaagaactaaccacatggaatgtttggaagttgaacaaagactgttcattaagcttgaaagggacagatgagccagctagcactttgtaacctggcagtcaggcctcaaaatcaagcctattattttagtaggccaattaagttttttagaaactcagtggagaggtggcgtcttcacccattttcagcaccttataaattaggtacttttgcctggcactaaaatatccttcttgaacttaaaaatcaaaatcaataaatcaatctactgctcaggcaacaaagaagcagacgaaaggcaacaatggggcagattaaacttctagcaatgaatcccaaatatacaggagccttagtttgattaagatgacaaaaaaactcctggaggaagggcactcaagtctagctcatggtctctttgttcttcctaaaatctacatcccttgcatcaactacagtactatagtcgacgatttgaagttgaagcataatatcttattttttctgacattacaagtatataacagatcacaaagtttttttttctttttttttttttttttttgagagggagtctcgctctgtcacccaggctggagtgtagtggcacgatcctcactgcaagctccgcctccaggcttcacgccattctcctgcctcagcctcccgagtagctgggactacaggcgcccgccaccacgcctggctattttttttctatttttcagtagagacggggtttcaccgtattagccaggatggtcgcgatctcctgacctcgatcacaaagttgattattttttcacttgtcaagttcttacactatctaaaattcttatcttgacctttcatgtctgtcttcaaaaacaaatcatctctcttcccactctctgccaattggatctctttctctttgctttgttctggaggagagaaaggtgtatctgtattattttcttctttgtctgaattaaacagctgttcttggagagtggtgagcagttctttatgcaaaggagaactggttacttagttttgtacgatttacaaaaaaagtaagaaagtgctgaaaaccagtatcttaaaatattcattttattcaattttattttaattggggcacagatatgagggaatagttttagttgaataaggaataaaaatattttgttataaatcctcaagaatatttataccttagaattgcttttatatttctgtttctatgacattcaaatgggcaaaattttttctagaatttagacagatttacaaataattgcataaatatgtctagaaattgaaaaattaaaagaaaaatacaacaatgagaaagtgaattgaacttgaaaaataccctaattgtgaaaaccaaactttcatagtattattttaatgttttctgatttgcattttgggaattcttgccttcactgtgttcttttccttagattttctctacatactgttcacaaaattcagttaaaaactattttagaggttgtctagggaaagggctgcatgctcagtcattgactgttacttactttggtacaattaggggtattaaatttgaattcactggatttgtgcttctccccacacaggctgactattcgtagctgttgctgcttggaatacatattggcttaattaatcagtactatttggaactctgtgaaaatgcaaactaattatgaactttctctgataagagacaattttagctcctgattatttgcttttccctacatttatataacagcaatctcatgaaatcgagcattagatcagcatgttattgatttgcactttaggcaatttgcacctctgaattgctttcctttctgatatcttcagatgcaaaatcttgaaaaagagcttacagtcagacctttatttgattgtttgataattgtttttcctctctgtttccattagcattatttgtggaagaccatagcagtgggagttcttgtcacagaaatcttgtgacctctgtgtttggtagctatagactgcaatgagtttatctcttcataggggaaattgagaagagattactgctacccactacccaagctctggttttctttacaaagcttctgcataaatcacaactacatagcttcaatgacggacctaactcttgcttggaagtgtggcagcagagttggatttaagagtcatggatttaagagcagagtcatggatttaagctacagtcttatcactactttatttatagtaaacactctgggggagacttttagtgctagattctgtgctagactctggtgttgaaatatgtgtcagctatggcctcagctctcaaggcattagttgtgtttgtgtgtgttgtgtgttttgagggaggtgttaggtgttggttgaaagaatgaggaaggggagcaagatttgaggagaaaacaaacatgcacatgtacatggtttcattgaataatctgcacttctgaattgtcagtacatccatctgatttagtgataattgaattagaatcattctgagctgcggtggaaaacattgaatatttttttcacactgaagccagaactcttgggtaccataacccagcaatattgtttgctggctgtcacttaaactcacaaaactcctctgttttgtcatctgtaataaatacagatacaatattttgttttatatatatgtatatatcttgcaaaattattgtgatgatgaaaaacgaaacgtaatacacacggaataatgcatagtagatgggaagcactaaataaatggctatgtaagcagtgattcctctctttgttatcttcattattacaatttctacataggttttatttcagtgatttttatagtaatgactttgcttattttataaaaatacttcatgccaaagagtacaaagaaaacaaaataaatcaccccaaattttcagaaacaaccaatattaacagttggtggaattcatttgggtgattttttttgtttcttctttgcactttttggtatttttcaagtttaaaaggaataagcacatacaattattataatagctgtaaaatagttatatgtgtttcaaatttcatactccaaaaagtttggatatagatggaagatacataactatatgtatagtgagagagagagagctagcagaatagataaaaaataattttataataaaagaatactatatctgcttttttaattggaagtattaaatttatctatgtgactgcattatttcctaaaaggtcacatttttttaaaaaaattaaaaaatattagaagattgcatcattataatttatttcttaaattttaattatatgtatatctatgaataatttatgcataaacatatacatgtaatgtcaaatcctaagaaaatgtatacaccttaaggaattatcacaaaacaaacacctccataactaacactcagaataacatttttttgcaaaatagattactactccttcatttgtcttgaaagatacctactatttggagtttacttttcttaaagttttgatatttatatacccactctgtggtaggccaataatgcctctgaaaggcatgtccatgtcttaatccatggagcctgactttatttgaagtagggcatttgcagatgtatttaagatatttgaggccgggcacagtggctcatgtctgtaatcccagcactttgaaaggctgaggcaggtgtattcacctgaggtcaggagttcgagaccagcctggccaacatggtgaaaagcccgtatctaccaaaaatacaaacgttagctgtgtgtggtggtggcggcacctgtaatcccagctactcgagagccagaggcagggagaatcacttgaacacaggaggcggaggttgcagtaagccaagattgcaccattgcactccagcctgggtggcagagcaagactctgtctcaaaaaagcaaaacaaaacaaaaaataaaagaagaaagaaaaaagaaatttgagaggagatcatcctgggttatctgagtgagccctaaatgccatcacaagtgtccttgtaaaaaggagacagagggagcagaaggcaatgggacaatagaaacggagaagtttgaagatgctgtgatgctggctttgaaaatagaggaaggcccacaggatggaagaggccatgaatggattatcttttggagtcttcatggagaatttagcccttctaccatcttgactttaggtcagtgaaacaaatgtacttctggtctctctaactgagagagaataaatttatcttgtttaaaatcactaagtttgtgataagttgttacaacagccccagaaaacaaatacacactcatttattttcttttattgcataacattatgcattgtgagtttgacctatgttgttacatgtagttctaatttgttcattttcattgctgaataatattcaataggcaattttaaaaattcatctttttttaaacaaataatgctgctatgtacatccttgcttgtatcttgtggtataaatatgtaagtgggtagctgcatccatttactttttctccaacagtctatgagaatttcccttgtactgtatcttcatttgtaatagttattgttagtcttttaatgttagacaaactagtatgtgtagaatggtatgtcactacagttttaatttaaatttctctaacaaataatgagccattttcatctggactgagccttgggtgaagcaagagaggcatctagggtacacaatttaaggacatgtttaatccctttcctttctgtccttgtttgtgatgaattatttctactttatcaaacaaaaagtgtaacaggtatacaattgatttttgctttttgtgcatttgttataaatccagtcaccttaccaaactggcttttatttctaattgtttgtagataattgttgacatttgtacataaccatgccatctccaaattagcatttacctttccttttcaatatttacaaatttaacttcttttaattgccgtatcccactagctggggccactataaatcttttatacttgttttgatgtctatagaaactgtagcgatgtcctctcctttattaatttctcacactggtaatttctggtctttctttctgtctcactgtttatctttctgtcactctcttcccctctttctccgtgtgtatgtatgcatgtgtgtgtgtctgtataaaagaatttaaatatacggatagtccttgacttaatgatggtttgtcttacaatttttcgactttacaatactgtaaaacaatcacaatttcaacataatgtaccatattcaatacattacatgagacgttcaacactttctgataaagtaggctttctgttagataattttgcccaattttaggctaatgttagtgcactgagcatgtttaaggtaggttaggctaagcgatgatgtttggcaggttaggtatattaaatgcattttccacttatgatattttcaattatattgggcttatcaggatgtaaccctatcataaggtgaggaacacctgtactctaattatgcaattataaagaggttcattatttttttccaggcaaaacttttctttgttgattttttctcttatatgtgtgttgtattagtcagttttcaaattactataaagatactacctgagactgggtaatttataaataaaaatgatttacttgattcacagttctgcatggctggggaggcctcaggaaacatacaatcatgaccaaaggtaaaggagaagcaatgcacatcttacacagcagcaggagagagagcaggaaaaactgccacttttttttttttttaagacagagtcttgctgtgcagcccagactggagtgcagtggtgtgatcttggctccctgcaacctccacctcccaggttcaagtgattcccctgtcttaacctcctgagtagctgagattacaggtgtgtgccactatactcagctaattttttttgtatttttagtagagatggggttttgccatgtgggccagctggttttgaactcctgatctgaagtgatccacccacctcagcctccctaagtgctgggattacaggtgtgatccattgcgctggacaaaactgccacttttaaaaccatcagatctcatgacaactccctcactatcacggatagcatggaggaaaccacccccatgatccaattacctcccaccaagtccctccttcaacacgtggagattacaattaaagatgggatttgggcagggacacagtgccaaaccacatcatcctcatttttttcaataatttcttcatcatatctcgtcatgtatttatttacatgtatttttaaattgagtactaggcattatatatgaaaaacagagtaatttgaggccctggaaatgttaacattctctagagaggaattacatttgctctttgcagtaagctaaggacactagcaggttactttaatgcatccataagtgtacagataatcagacactgggtttatgtccttgagtgggctgctctttatcgagtgtagtccttgcccccaactcaaagcctggagggtactgtgctccaattcttcccaccacagtcccttgcacactcacagttacatgcatttcactgccaaaagtattccttagttttgcaatctattttttaacttcctagaatcagtaaaaatcttgagctgaaaagtgatgctcaatgccaatctcatctcttggatctgggctttgcaattttccattgctttgttaacacttagtgtctcgaagaaaattttgttgttgagttccatgggagagttgatatcaattacaaatctgcagttactggtagaagttcctgtggtttctattttaccttcagattttacttttagactgctccagtctacatctttttataagagatcatgtgaggacagtttttttttttaattctcttctgcaacctctggagttttgtaacttgcattattcttgttttagtaaaatttatgcctttttttctatagtctgcaagaagttttctttagttgcttaatctatgtgctgtatttataggacttattgttcatctgtcatttcataaaatgtctctttttactttctccttattttggctcattctttggctagatttttggggtgatgttatctgagatctcttatgtctatttgttgcttgaatgacccttcaggttttacataattttttcagccattcttttattttcttaagaatttcctggtaacatatttcccctataaatctacatccaaatccttccttaatttaaggaatcactacatgatagtgaacgtttaattctcttttattccaatttgagttatcaatgtcagtgccaattattctttttcaagatatcattgcctgcactcttcacgtattatcttgtttataatgacttgaatcatttttgtttattaacatacatagctacactccccccagaggaatagggaactcacatatgcaaaagaaaatccatgggaacaccgacaacacaatttatccatcatccagtagtactgagtaaaggctcttggaataagaattttcaacacaaatagaatatgaaaaactataatatgcatacaaaatgtgataggacttggacgtttaaaaaatgacttctagttgaaaactaatgtgtagactagcagaaagatataggtggaattgatgagcataaaattattaaataaaaacaaaaaataggagtacatgataaatattttcaaagtatgatatctgaaaaggctaatacaatacacttttgacaatttccaagaaaagtagaaagaaagaagaaaatttttaaaagagataaagatactacacctacagatatgaagaaattttaaaacctcaagctgtagtcattaaatatgattattatctgaattttaaatgcatgcactctttgactcaccctttgactctattgttatcatctctagcagatgctcagtggtctgataggatcagtaacaacacagaaccattgccaagccacatggaagcatgaagcaaaagaaaacctcagtaatattttgtctttatttaaaatgttaatatgttgttcatcatggatttcctgcattaattttgatttaataaaatattacattatcatttaccttgattactgagtttatttgacatccatttagtttcctcacctgaggcagaaagggcatcatgttcttcactctgagtcaggacctgcacaagacctaaaaattttacatttatgtccacttaggcagttgaggtcttgccttctaaatttctctatagctcaccacgaagaaatggtgttgatgtagggagagggatacactctcgtagtgctagttccaggaagatgcccatgtgcccctgatagcactacggagtttagcaatttctgccttcactgcttattttactttttctcttcctcagtttgtttccattccagagagccaggtcatgggcactggaactagacaaataaggattgaaaacccacttatgtaaccttgaatgagttattttacttgtctgagtctcaattttcttatatattaagtgaggataatttttaatttataagattcttgtataaataaatatgtacagaaagtccatcatacacctagtccacagcatggacttaataaatctcatttatcttttcaactctatttctgcttcccattcttcaacttactactacaaagctaatccatagctagtatatagtagaaactaaaaaaaaattgaaatgcatttcttttattgctataatcacaaatatgttacatagacctacctcaatgctagagttcatccattgagttggttcagttatgtttaatattagtttaatatttcaaacgtagcaaaaatagtttattatttacttataatatgtggaggaaagtaatcaataggcttcttagaaacactctgattcctgatcgaaaccccattattcagtgaaattgttttgataatgtatacaatttcagaaatttatatttttgcttctaaaatctcaatgtatttagttaagagaaataaaaataactttagctgactttataatatataaagtttattttaaacctttgcctttaaatgaaaaaaataatgttattagaggttttatacttttctgtatgtaacatcaggctaattttcactagactgtaaatattctaatatggacaggcaaatcagtactgaatatacaatatattttcttttctatggatggtgcctaaattacatcagtttagaacaaacacgcttaattaaagccaataaattcaggtcaccaagaaaatgtttttacattttaaagagttttaagatttgttatttgagttagtgtcctttgaataatggctgagagaacagtttttttttttcaattacacaagtatttcttcatctatttagaggctctgaggtcagactagattaaaaacgcacacacgcatttgtctgaagtaatggtggaaaattacctccttggtgactgtagtgtgcaagattgtgtgcggtttggtttctaatctttcatttctttccaacatgaaaaaataaccttcctcaggcaagaaaaaaacattgtacttggggagttgcctttgatcaaagaaaggggtaatagctctttcctgaaaatggtgacaagaatgaaaaatggaaagaaagatctattttaactagaagtaatgattttgggggaggaatagggagagtatatgtgaggaaacaaggaaggaaactgagagtaacagtcactgatgccagtttgtgaaagggatgaggctgaccaacatgccttgaggccatatcagaaaattttagttttcatataaaatatttacatttccatctttttttcctatattatgagggtaatcaaaagaagaattttggctttgtacagaattttcctacatattgatgaagtaaaaatgccaagtatattcacattttcaaggttttactgagaataaagtttatacctagaaatgattttaatacaagcaatgggctatcctaggaaaacaaaacggagagagatggtctaacaggaatgatgtagcagaattaacataaatgctgctatgctttggttctgtgtccccacccattatcacgtgttgagggagggaagtgataggattatgggggggtgggtggtttctcccatgctgttctcgtgatagcgagtctcacgaaatcttttggttttaaaagaggcagttttttcctgtgctcctacttccctctcttctgtcaccttgtgaagaaggtgcctgcttcctcttcaccttccgccatgattgtcagcttcctgaggccaccccagacatgcagagctgtgagtcaattaaacctctttccattataaactatccagtctcaggcagttcttgacagcagtgcaaaaacggattcatacaaatagaaaagatattatcaatttcatcctccccagaactttcatgttttcactagatttatgagatatatttttcaatctccttgaaaatcaacacaagcccttcgttatccagtctcattataaaataaagtatttgttttatattggcaccatgacaatttcaactaaattaatggcttcagcaacataaattattatctcacacttctgcaggtctgaagtctcagtgggctcaaccagctcccctgttcaacatccggcaaggtccaaacgaaggtgacaatcaacagggatcttattgggaagctctggtaaaagtacatttccagatttattaaggttgttgtcagaatttagttgtttgcagttgtatcaccattcccagtatcttgtacagttgtacgtcattgttttcttgcgtgtgtcaactggtggttgctggtgtcagctcctagtaacctgtctccagtcttcctatgtgagcctctacatcgcaaaaccagcaatgacgcctccgaaacttctcaggcagaatctttctaatttctccctctgccaagcctctctttctccagctgaagtatgttctctgcttttgaaggtttatatgattagattgggttcacctggatacttaaagctgcttgccctatcttaaggtttgtaaccttagttacagctacaaagtccattttgccatattcacagattccaggaatgaggatgtggacatctttgggaggctactgtgcataccgcaaatactaatctcacaataatctgtttatatcctatttttggccattaattcactgaaattcatactctgcattttgttaagtattcactctctgagctgaagcacagtaatacagaaaaacctagatgattcaaaatgaaaaacattgatagagtaaaaagaacatcagaaatcattggtttttgagactaatgtgcgaaagtttacttttccatattttttgatagtatttttccttgtttttaattttggtatactttagataagatgaaatgcacaatttttaagtcattattcaatgacttttgataaaaatacatgattgagccacccaaagcccatagaacattgacattcccccagaaatttctcatgccacttaacaatcaattcccgtcaccctccagccattattcttgtttctatcactacagattgatcttgccctttctgaaactttatatggatgtgatcatataatacatacttttggtgtcttttttggtagcatttttgagtaattttcaattatttgactatatcacagcttttacaacccattttcaaattttgcgggcctttgagttctcttcagtttggggttatcaagaatgattatactgttatctttatttctgttaggcttgacaatatttcataatcatgtattctcagaataatttgcaatttatttatttaagcagtcttactgatttttaggtaaatatatttttgtatttaaattttagggtacatgtgcacaacgtgcaggtttgttacatatgtatacatgtgccgtgttggtgtgctgcacccattaactcatcatttgcattaggtatacctcctaatgctatccctcccccctcccccctaccccacgacaagccctggtgtgtgatgttcccattcctgtgtccaagtgttctcactgttcaattcccacctatgagtgagaacatatggtgtttggttttttgtccttgtgatagttggctgagaatgatggtttacagcttcatccatgtccctacaaaggacatgaacttatcattttttatggctgcatagtattccatggtgtatatgtgctacattttcttaatccagtctatcattattggacattaggcttggttccaagtctttgctattgtgaatagtgccacagtaaacatatgtgtgcgtgtgtctttatagcagcatgatttataatcctttgggtatatacccagtaatgggatggctgggtcaaatggtagttctagttctagatccctgaggaatcgccacactgacttccacaatggttgaactactttacagttccaccaagagtgtaaaagtgttcctatttctccatatcctctccagcacctgttgttgcatgactttttaatgatcaccattctaactggtgtgagatggtatctcattgtagttttgatttaaatttctctgatagccagtgatgatgagcatgttttcatgtgtcttttggctgcataaatgtcttcttttgagaagtgtcagttcatatcctttgtccatttgttgatagggttgttagtttttttttccttgtaaatttgtttgagttctttgtagattctggatataagccctttgtcagatgagtagattccaaattttttttcccattctgtaggttgcctgttcactctgatggtagtttcttttgctatgcagaagctcttttgttcaattagatcccatttgtcaattttggcttttgttgccattgcttttggtgttttagacatgaagtccttgcccatgcctatgtcctgaatggtattgcctaggttttcttctagggtttttatggttttagtctaacatttaagtcttcaatccatcttgaattaatttttgtataaggtataaggaagggatccagtttcagctttctacatatggctagccagttttcccagcagcatttattaaatagggaatcctttccccatttcttgtttttgtcagatttgtcaaatatcagatagtttagatgtgtgtcattatttctgagggctctgttctgttccgttggtctatatctctgtttttgtaccagtaccatgctgttttggttactgtagccttgtagtacagtttgaagtcaggtagcgtgatgcctccagctttgttcttttggcttaggattgacttggcaatgtgggctattttttggttccatatgaactttgaagtagttttttccaattctgtgaagaaagtccttggtagcatgatggggatggcattgaatctatgaattaccttgggcagtatggccattttcatgatattgattcttcctatccatgagcatggaatgttcttccatttgtttgtatcctcttttatttcactgagcagtggtttatagttctccttgaagggtccttcacatcccttgtaagttggattcctaagtattttattttctttgaagcaattgtgaatgggagttcactcatgatttggctctctgactgttattgttgtataagaatgcttgtgatttttgcacattgattttgtatcctgagactttgctgaagttgcttatcagcttaaggagattttgggctgagatgatggggttttctagatatacaatcatgtcatctgcaaacagggacaatttgactttctcttttcctaattgaataccctttatttccttctcctgcctgattgccctggccagaacttccaagactatgttgaaaaggagtggtgatagagggcatccctgtcttgtgccagttttcaaagggaatgcttccagtgtttgcccattcagtatgatattgggtgtgggtttgtcataaatagctcttattattttgagatatgtcccattaatacctaatttattaagagtttttagcatgaagggctgttgatttttaggtaaatattttttgagattacctgcccacaaacataaactacctattgagccctgcttgtattttgatgggcatatgcacatatacactcagagttgaatgtggctactttaaatgacttctgccattctcataaaataattagcagattttccagtttataaacttgatgacattgctatataagatactggaaaacaaattccattatataatatatgcagagataagtttttggaattgataaggcacttttccaggattttttatcctagatacagttgtttggataaggacattcttatagatagctggcttcataactaatacaagcaatttatcataacatacccacagttaatttttttcttcacttttgccctacaatgggtgctcttaaattcctttgtaatatctttaaaggtatagaaataagaaatggaaagaaaaataagcctgagaagactttgggctccaaaaatcttttctcttggtaaccatagcagctcgtgactcaataaagtgataaaaagacttcatattttggggttaaaaaacttgtatatgttagtttttctgacaaagataatcagatatgacaattactaaatcgggatattaaaactatcatctcaggataagaacaattacatattttcctgttgaaacattagattttttgttgttgtcattgtccattaaggaaaacctatctgttcttgtgccccagtagcactccacatctttggtagatgtgagtttatattttttatcactactcttgtgcttgaagagcatgctttaacattccttgtagtgcttttctggtggtaataaactctttcacctattattttaaccttattaaagtgttaattttgccttttgaagattattttcactgaatatatcattctgaaatgacttattatttattctctatactttaaataatttttagattttcatttagcttatatttgttctgatgagaagtcagaagtattttttatcattattcccttttctattacatgccttttctcccacctacaattatgaattttaattgtatgactgtgttgatattctacatctctccactgtctttcttattttcctctaaatccttggacatattttaataccagcttaaaaatgcttgtttttattcttaacaacatcctggctatctaaggtctgtttctattgcttatttatctcctaattttctcataggtttctgctatttttgcatgtttaataattgtttttgttttatatttgacatttttcatactatattatttagattctagacttccgtctttggtagaagtgtgttgaattttattttgagcagacagttaatttactggcacattagtttgatccagttggtgcttatttttaagtttttaaggctgatttaagagtatttcttctgataggagtagatgagccctactttggaagctgacttttctgagttcttatttaaacactgggagatgctcagtgagtcttttcactttgactggttgaaactctaatggctttcaacattgatgaaccagtgaaatcctcattccgctcatggccccttagaaactgttctctgtgtggctttgtgaaatcttactctgtacatgcataatatgttgttcactcaaaaaattcaagaagactcatttgtagatttttagatctctttctcagttcgactctttcttctctggaatgttcttcataaattccagccacctcagctgcatcctataataggtttctccattcagaaaaattgctgtgatctatttgggctcctctttcctttcctgcagtttggaagtatccctatataaaaggccagctttaaatgtggagttcacttcaaggatcatgactctatgctgtgtgttgtacaatgctttaaaatgggcacatggtacattttgtctagttttatagttgtttacagcagaagattcagtctgaaatccattattttattatggccagaaccagaagtcaagcactctgttttttgaaaagcacatattgtgtacctgctaccttccatgtaccataccaggtgtgttcaaatacatagtcaagtcagcttttactatttgttgttccccatgaagggcttacattttattttattttatttttcagagagagagcttaggcagattgttattcaatatctatgcatttgctcatgctgactatttctggtatatttttacatacttcctaaatactgtttgtcttgcaagatttatggcacttcttttttgcatgtttttctaattcatctccaaaatcaacctttctcaacttcatttgttcataagatacttttaaattcacctctgttataacatttaccctgttgaattttagttatctctgtatgtgtcataaaaacccagcaaaattttaggctgcaactgccacttcctctctttgtgactcagcttgtcacagttacaagtgcacatattaggccatttctaagagttcattgtactgaatacatgctacctaatttaactcacataataaccttgtgaggtatatagtataattatcattatgtttaataaatgaattgagtctcatataagttatttattctagtttactaatgtcagtgatagaactgaattctgagttcaagctccgtgtttgcaactctaaatctactaatcatcactataccacatttatcatgcattgccttcactcttgttagcctgacaaataggaaaataataaaataatccttaaatatcagtactatctcatacaatttcatataactcacacaattttaatcacaattgaaaaggtctatacagcttaattagtctaactccccattcaatggtcgtattttctctacggtattcctgaccataagactttgttttgaccctgctgtttgtgtcccccatcccttaaagcaatccatgtatgctagtaattattaattccttagagtagtttacatatgccatcctaaaacttgtatccaccatttctttctccacccttaatggctgtatacaatttttccccttggtcattcattggcaagccctcagatatttgaaaacaactaatgttgccttaagtcctctttctttcaaggtaagcatctttagttgcttttctttgctcttcttcttagattggtttctactgtttacatcaaatattttctgtttgtggacaagattttaagaaatgtaaaactatgaaacatactgtcctgtatgatcatactaatctgtgaggttattataatcttaggtgttattacaaagcttttactttccctttccaagatgaacaacacagcaagatgaataaagaaaattttccctctagtaactagaagagttagataactatgatttacagatgaaaacctagggccagagccttcctgtaggatattagacttccttttcaagacgtggccccctatataatgtttttaaattatctgccctcttccttcaattctgtcactctgttatgtcctttgaaaaaagacagtgaaggagttatatttggaaatatgccccatattttttctgatcactagaatgcagaggtggacatgaattttatgagtctgtagagttagggagtaaatattttaagtaattaattctacaatattaaaaacagctctcaccataaatcaacagctgaatggtgggagttggacataatggagaaaatatggactaaagagattatgaataagtattgtagagaatccatattttaattgggtgaattaagtaaactcttggatggattaaaaggttagattctggttggatgtggttttcccttatgttccagaaatatgtcaactcccgatttacaacaaaggcccaaattcacaaaaggagaaagacacctcctttcctacctattagaagaaactaatattgccatcagaccatccatatgccattattattttatattactcagattataataggcagtgaactttcaataatatatcacctgatcttttgttgtttatatcagaaaccagtaatctttctctgataaagagtatgagcccatgagcccatatacctgacaaatgtgtaaaggcaggagcagtgcccaggtgtccctgagaagcctatctctgccactactttcttagggccgcagagggtacatatctcatgcaagcacacacttgccctcacgtgtgtgcatgtttaccctctggattagcccaattctccattcacctttagttttgcctcatattttgggagttcggattagaaaactgatctaatccactcacatttctggcatctctaagcttatatggtatcaatgacctcatgatcctttagatttatttttaatatctgagtatttactttcaagggttaattaaccttggtgaaatcttaaaatcttcagctaaagatatactacatgacaggcatacaactttggaactgctttgctatgaacctacacaaggtaaattggcagtggtcacatattaaagtagctgcttgaacaaaccttaatagcacagctttcatctcaggacttattaagatccagtggttgcttagagataaattagtttgtttgctataatttgttgaggaaatcaccatacaatatgccattagagtgcacatatttcttataagatacctgtggtaaagctcttcctgtcatcctaaactggagaacgtactgaaattagcttcatcatgaaagtttagatgcagctgaaaattcagagacaattgctttatcttaaaagctattttcacttttccattgccacatttaaaagttaaggtttatagagaaatattctcaagtgattatggaacaagtgcaggaaaatagaaacataaaaatatgtatttcaaggcatcaattctaattctgcttctaaaaatagtcagtgtgcaaagctgcagttgctggggtattgcttcaatgaagctgcatagtcaccatcaactacattttcaggacccacaatcttcatatatatactttattttttaatattatagagaaagacagcgtaataatttggtgggagcttccccctatgtatgatataggaaggtagacaaattagcatctgcccgtgctatgatgatcacaggaacaatcttgcagctgacaatgccaagaaattactgtccttgaataacgtcaagctttaaatttttgactactgaaatttcagtaacaaatattgcaatcaaaattgaatttcataaaactttggattcattttacaatagtaatattcagcttcaggtgaataatgacattgatactcagcctttcagtgttcagccaaatatttatttggtgcgtctctactttatatatatttgcagattttaaaatattttttctgctgtgtatcatcataactgatacatgtacacaaacatacaaaatctttttttttttaatttttttttttattatactttaagttttagggtacatgtgcacattgtgcaggttagttacatatgtatacatgtgccatgctggtgcgctgcacccactaacgtgtcatctatcattaggtatatctcccaatgctatccctcccccctcccccgaccccaccacagtccccagagtgtgatattccccttcctgtgtccatgtgatctcattgttcaattcccacctatgagtgagaatatgcggtgaaaccataaaaaccctagaagaaaacctaggcattaccattcaggacataggcgtgggcaaggacttcatgtccaaaacaccaaaagcaatggcaacaaaagccaaaattgacaaatgggatctaattaaactaaagagcttctgcacagcaaaagaaactaccatcggagtgaacaggcaacctacaacatgggagaaaattttcgcaacctactcatctgacaaagggctaatatccagaatctacaatgaactcaaacaaatttacaagaaaaaaacaaacaaccccatcaaaaagtgggcaaaggacatgaacagacacttctcaaaagaagacatttatgcagccaaaaaacacatgaaaaaatgctcatcatcactggccatcagagaaatgcaaatcaaaaccactatgagatatcatctcacaccagttagaatggcaatcattaaaaagtcaggaaacaacaggtgctggagaggatgtggagaaataggaacacttttacactgttggtgggactgtaaactagttcaaccattgtggaagtcagtgtggcgattcctcagggatctagaactagaaataccatttgacccagccatcccattactgggtatatacccaaatgactataaatcatgctgctataaagacacatgcacacgtatgtttattgcggcattattcacaatagcaaagacttggaaccaacccaaatgtccaacaatgatagactggattaagaaaatgtggcacatatacaccatggaatactatgcagccataaaaaatgatgagttcatgtcctttgtagggacatggatgaaattggaaaccatcattctcagtaaactatcgcaagaacaaaaaaacatacaaaatcttatgaaaggcaaatgcaaacatatacacaaagaacttattataggaaaatgtgaaaaaataaaacattcaaagcagagatcattacataagatgacaaaactcaaactaaacatatcttcactgttatatgtaatgaaataaaattaataattaaagcaaaagacttatattggacaagaaaaaatgtgttgataattctgttagctccacccaaatcgtttatctgactttcagttctctgttctgtgctccaggaggcgaactcccaagactttatcattcaggttcctctgccagctagctcctagttgaattggattaatgtaaggcactggcagtgggtcagatggcagaaagagagagagagaaatcctgatatctataccctgctttcttcctaattctgcatgaatgtagtttctaccagataactcttctccacagcaccagatctttctaggcttcaataatgcaaattatatactttgtcccttcaggtctagggatggtaacagcgtttcattgttcctggttgtctgagtattacagcaacctttgctggggttttaaatcctgctctaactgaggtaagtagtccattcaccaaagtctctattgtggaccattgaagcagatttctttttcttttctttcttccttttttaataatagtgatggggtctccctatgttgcccaggatggtcttgaactcccaggctcatgtgatctcccaccttggcctcccaaaatgctgggattagaggtgtgagccaccataccaagcctgaagcagatttctgttttatacaagggtcctaattaatgtagaagctattacaaaatggggtatgtaagaatatctctttcttagggaataacaggtagctataccttgtactgcctaccacacagaaagagcagagtgactgagaggcttctctggattttggaagtaacatgactacagttgtgtgtattcaaacctattacaggctaactcacaagtctacccatttagaaaaaagagctctttgcagcaggttcagtctgtgctgtaggctcctctgctgcgtgggtattttgactcagtagatctaagtatctggcttagagtaatgctgtttgacgcttctaagtaaccccaagaagacaatcatagttcacctaactaataattttggaacaaaactatgtccccttctgccaaatatttttatctatttaagaagtctggcttgtcaccatgtaactatgtgatttgaagggttcacaatcaactgggtgctatccaagttatcaaatcttaaaattgtgcttgaaaattagcaggttattataaaatggaattgatatgggtgacattaaggctgaacaggaaagggagtcacaagtatattgaatgagcaggtggttcagacctttattagctattcttgcttagttatcaaattttcctcaactctcattcatattcaccaggggaatcccctaaagagaaggtgctcaacaatcaggtagattaggtgtctaatctttcctgtggatgtctatcaagctttctcccagtgatactggtgcttacttagtggaaccatgcaaaaagtaatcatagttgcatggatggtaaatatgcatgaactcaacacaatggactaccctttagcaaccctgatctgtctactatcactgagtgtccaacttgtcaataccaagggccaatgtgttcctgatatggcaccatttcatagggacaccgaccaggcacctggtgctagggtgattacattgaatcctttatattgtggagtaagcaatcatttgtccacataaaaccaaatacacattctagaaatgggtttctcttctctgccatcaatgcttctaccagtgtcaccatatgtcaccttatagaatgccttattcattgccataacatcccatactacattgcctttgacaaggaaactcattttatagcaaaacaattgttacaaaagatccatgcccatgaaattcatgtttccccacatgtcccatcaccagtaagcagctggcctgatagaatgatggaacggctccctaaaggctcagtttcaatgccaggtgtgacacaatattgtttgaaattgtggtgctggcctaacagattaaactattagccaatacataagccatatttccaaaagccagaatatgtaggataaggaacttagaagtagaattattttacctaatattcgatttacagaattttatttcccttcctggaaacttgtatttagtagcgttttaggttctcttttccgaggaaggaacatttctttcaagaaatatagctatgtttccattaaatttggacctgaaattgcactcttgctatttttagctcctaatgccattgacctaactggcaataaagagtttaactatactgaatggattgattaattctgattaacacaggaaaattaggcaaataggcctagttggaatccaggagatctgctgtggagccttttagcacttatatgtcccataaagagccaccaaataaagacagtatcactagggactttgatcctatgaaatgaagatttgggtcatctcatgagacaataattcctgtactatggaagtagtaaaatttgcttgaaaatggaatggataatagaaaaaggaaattatgatgataaaatttaggctcatgaccaaaagtgaaaacagtagtagctaatttacatatttatgttaactgaatatttctttcccctcactctccttgctagctcatataaagagtaccgatagtgggtgacattaacatttataatccagttgggaataagactgaattgctgacaccctgccacaatttaaattatgctagaactgtggtttccctgtactggagatccaattttcttaatctaagcaagaggcaacaatgaatgagaagtcggagtaatgttctggtaagtttttattgacttcatggatttattttcttcccttgtctaacttgctctgtgctcatggatgcagagccatgcagtcaacatcattcagattcctttgttgcctgaatttcagcagaaggcactcagtgggaggctcctctagggttcaagttaggtggagaggagaatgggttatttattccccgattccctctgctttggttctgtgcttctgccaggggctgaatctctccataactagaactcgtgctatgcaacctttccttgcagctccagaactcacttagctctggtaatgctatcatttctcttgtccttttatggcttcctgtggttggtgtctttgttcctctgcatctctctttctctcttattttttttaaccctagctacatctccataaacagactctttaggttcttgacagtggaaactctgagaggaatcatgattccttccaggattacattcagtaacaaagccaatgatttattgcatacaagcaacaactctaataaaaattaactcaaaagcttgaaagtgaagctttgggcaaaagaattacaggcaaatagaaattaaaaaaaaaagcaaagatcacaatatttagaacaaataggttttattcatggttggtaaaaaatatgaaggaggacaaaggcactttgtatcaataaaaaggtcactataaataagtaactgtcataaatatttattaaatatgtatgcaaaattcagaaaacaaaaacttcagaagcattttttaaaatacaatttataatactattttttcagctgatgaaagatcaagtgaaaaaacataagtgagatttaggaggacataagcaattaatggaggataactaatatgtgtatatttattcaaatactcgtggaataatagtcaaagtgaactaagtattgggcctcaatgaaaaccttagcatattccaaaaagtaaaaatagtgtataatttagtccatgatgacaatgtaataaaactggaaattatttctgggaagtgatattgcctgcaattgttaatttctacattttaaaaaataattattctgttattttgttcagtaaacattgtacttttttataggtaaaatatcaaaatactcaaatatatacaaaaagttcataatatataattttaaaaataccatacaaatatcaaacttagaagaagcaaaaacaattgtagctgtgctaatagccctcagtgagttcagaagtttataattagatattaaaaggagggtaagaagtacatgtatagtaactggacagtgcacagccacaagttgggtatagccctataaattgtctattttaaagtatacatatatagtaatttgctattcagaaatgttgaatcatttaaacataattttattattacagaaacagtatatgtacatcagagaaaagtttttaaatgcagaggagcaaaatgtgttgacatagtcctataaacaagaaagcaccattgttagtacctttgcctctagccttacatattatttttcatcagatatacactttgtaacctctttttcagtcaataattttcatatttttattttcatgcattttcattatatataatgtccatgctgtatttagatgtctttaattaattaaacatttttctttatggctgatttctttaaaccagtctcagtgcagtcctgcacattatatctaattgtccaccccttaattttttttttgaatccagaattacccccctttttaaatggtactgacttgttgaaggaaagaggccaattgacctacaaaacggcataccttgaggctttgcttgattgctttctgtgtctaaatttacacctaatgccttaatggctgccagctaaacacgcttgactagaataaatcacaggtgaaattttgtacctgatgttgtactacatcagaaaatttgtaatgtcaggtcgacccacagttgagacagtaaaagtgatcattggtttgtatgatatctgatatctgatactgatgtcatccttcagttagattgccccttttgcaagtatggtatgctatgaaggtctacttccccataagccttcacttaatgaattttagcagcaatgtttctctttcataagcttccactgaaatataatataattgaattgtgcaaatcataattgtatagctcaaggaattagttcagagcgaacacacccatgaaactatcaacctgggtcaagaaacactcaagggacacataggaggctcctcatgccccaaccacattatttccctctcccttctcccaaagtgtaaccactctcctgatgttaaatggcaaagaataatttaccccctataaatagactaatacagaatgtgtttgtatttgttcctcttgttcaaaattatgatcaagattcacagatgttattgtgtgtatctttatcatattcattttgatagatgtaaagtagtacaatctattcatacaccactatttattctttcctgtcttgctagactttgctttccttctgtggctaaataatccatttgtgaacattgttataagtttctattactgcatatgtgcatacaattctgttgaatgcatacccagaaatgaaattcttggatcatacaggacgcatgtgttcaaatgttgtagataatatgaaacttgtttccaaagtggttgttcgaaattcatcctgatagcataagagatttccggttgcttcaaaaccacatcaacactttaaattattttctatcttttaacttttctggtgaatgtatagtatttctcccgatggacttaattattatttaaggacaagtgaggttggatgtcttttaaaacatttattagatatttgtataatctcttttgtaaactgctttttcaaaatatcgcccatattcttattgggtggactctcttcttattgtttgaatttttatgtattctgcatataagccatttgtcaattatataaaccacaaataatctagtttcatttgcttttgctctcttattggtgcctttttagagaagaaaacactttttaattttaatacagttgaaatcattaatgtttttcatatcctgcttaagaaacctttgcctttccaggccctgaagatattctttattatcttataaaattattgcttttccattcctatttagagctacatgaatgaaatggtgaatgaagtgaggtaaaagtctagatttctttttccatactgatacaagattctatactgttatattggtctacctatgcttgtgatatttacctttcttcattactatggtttatattatagccttgatatctgggactgtaagtactttgttcttttttgagatgttagctgttcttagctttttgcattgtcatctaaattctagaattcacatgtcaatttttgaagataaagaagcctcttggaactatgattgatattgtagtcaacagatgaatttaggaaaatgaacatctttataaatttaagttttcaatttatgaacacattctatctcttgatttatttaggtttcattcaatgttacccaataaagttatatagttctgcagagattttgcatatatttaattaaatttatctcaagtatttgatgttttgatgctgttcaaaggggtatcttttttatctttaatcttctatttattgtgtaaagaaatacactttttaaaatattgatcttatatcagaaaccacaaaaaactgtgatattaattctaataatcaagtagaaaattatcttggacatttcataaacacaaatgtatagtgtgaaaataggagtggcattttacctttctggtctttagtctttactccttgccatcttgcactggcgatgaatggattagaataaagtgggatggggtaatgataataagtaatctagcctcatattttatcttacagacaaaatgtttaacatttcacattatgaaggattttgctgcagattttttctttttttgaagattatgtttatcaattaaaatgctacagtttgctgaggttttcaattctaaaacatactattatcagagattttagacaatcatctgatttttctttttattcagtagtacattgcactaatagacttttaaatattttgggcaaatttgagcagaaggaggataacctttcaaacacgaaagttgcaagaaaagtacaagaaaccacatagtattttactgagattttcagattcaccagttgtttatgttttgctccatttatttatgatttttcctcctctctcattcttctctttttttaattatttaagactaatatgtcaaatttgcccttctaccctgttagggttttgctgtgtccccacccaaatctcatcttgaattcccacatgtgtgggagggacccagtaagaggtaattgaatcatgggggcacgtccttcccatgctattctcatgatagcaaagaagtctcaaaagatctgatgattttatacaggggaatttccctgcacaagctctcttctcttgtctgccaccatgcgagacacggctttcaccttctgccgtgattgtgaggcttccctagccacatgaaactgtgagtctattaaacttcttttcttttgtaaattgcccagtcttgggtttatctttatcagcagcatgaaaacggactaatacatacccccaaatgaatcaatttgactttctaaaaaaaggacatctccctataaccaaagtataattatcaaaatcaaaaaagtttactcattgattttttaacgttaaaacatccttacatttctggaattaaaggaagtttgttagtctacattaaacttttaaaatattctactgaatttgtttaaaaagtatttacataagatttttacttcaatttgtatacgaagcctggattgtgtttttctttcatgtactgccctgtaagatttcttatcaagataatgtggccatcataaaatgtgttggaaagggtttctgcaattacagaaactaagtgttacagaactctaagtgttataaaagaattactattccattattaaatctttagaagaatttgcaggcaaatcctggcatggactattccaaaattgaatatgttaaatatttaatttcattaatgtaaatcagattactcatattttgtttttttcaagtgtctgctttagtaagtagtatttttcttagaatttgttcatttttttctaaattttcaaattgttgtcaaaatttgttcataatatccttaaataaatttaaaaaaaatcacgtgttgatgtataatttacattcattagaatttactcttcttagacatccagtttgatgattatggataaattatattcattagaatttacccttcttagatatacagtttgatgatttttgattaatgtatataatcatataactaccactgcaatcaatatacagaatactcccatcacccccataaattccctcaatttcctttgtattaagtctccaacccctacttatataccctggcaaccactaatctgatttgtctctatacttttgcctttaccagaatatcatataaatggaatgaaacagtgtattgcctttcatgtcttttgcaaaattatgttctttcatggattttaagtttcttctttttaaattgctaatattaacctactatctctatatagaaaactttgtttatcactagctgattgatgtacatttgagttgtttctaggtttaaggtattgtgaataatttgcatatagtgatttacatgaacttcccttgctcccttttttgggggtaaatttttaagagaggactttctgggttgtatgtaagagaatatttaaaatgataagaaacttccaaactgttttccaaagttgctgtatcattttgcatccccgctagcaaattgagagttttgtggtccacatcctcactatcacttgatactttcagttgtctataatttttaaattttagccaatttagttatatgtgtaggggcatctcattgtgaatttaatttacatttttctagtgaataataatgttggtcatttcttatgcttactggccatttgcatatcttctttggtgaagtgtttgctcaaatgtttccctactttaaaattttaaaaatttaaaattattttatattctgctaatattttacaactgaagttcacaaaacactgaaagggttaattcagacacactggcagaaactgcagtctctgataatctatatatattacttaccaataattggtacagagttgtgattaatgattaaaaagcctgagaaagaactaggacaaagcgcttctgagccttacgtaacttattttcttggactggatttgccaaaacaaaattgatctttggctgtatgtttttggtcgtatttcaaagaataatatctttaggagataattccaaatatccagaaaaatgcttatctcgaagtctacttctgaaactttaaacttgacccaacctcccacatgtcttttccaggcaattactttgactttctctaattcattctctagtcaggatcttaacctttatttttttttcttttccccagctttcttgaactaatagtatctatgaaacatattcttggaaagcaaagcaaacaaagaaacacacagttaaccaaaagttagcaatttgatgaacaatatcatgtcaaaagttagaataccatcccagtagtatgcctctgttgtttgtttgcagatctaatgaaatcataacatacgactctcagaaaacaataaggtaaagatggcttcttaaagatgtcctagacttaacagcaataaagttctaggtaggagactgggtccaattgttttttaacttttaatcccataagattttatctttattagaaggaatgatattttttaaacggtagttaaaaacaggtaagaaatgagagattattacacaacagtgcactctatagtatgtgataaacgtctctctctcttttgaactcaacagtctgaagtaaaatacaactatttcattaatcaatatgatatttaaatcaccaaattaaaaatgatcactgtgtgttaaaattgtctctaatgacacttcactatgcagaacatggtaattactttgaaaaatcagctattccaaggtaactgggcagttacaatattttatcaggtaaattacctgtcaccatcaacattcatcacagactcatttggattttattacagattgacatttacttatttgcccaacttttaaaattacaactgttgcacgattgccccagggtgcaactgtagaaaattagcacactaattacattaattatcataaataaaaggttatcaaagagtagcatgtaataacatagtattttttaaaagcaacttagggcatccctataataccttaaatttaggtattaaattgaaattttcaagactgctttacctctatagttttaatctttaacacctcagctacaggaatgttattgttaatgccatttcagaaatgaaaaagccgcagccaaaacagctgcatgatcgccctaagatcatacacagttgcaagagttaaaggtcaagtcaaaaaccacatttcctaaacttccaactttccattttttgcccctatatttttctgccttttagggatgaaaagtaaaatatttatcttttatgctccaatgtatcaacactttaagtgaactaaagatccaaaagtgagtctcatctgcttgctttttcccacctctattgctaccgacctagtcaagcaaacatcatctttcctctcaagtacctgtaacaactcccttccttcttgccccataaaaatccatattatacagagatacccaactgattttaaaatataaataagatcatgcccttttttttttttttttttttgcttaaaatgatctgtggattctcaacatactggaataaaatctaaatcaccaagtcctataaaattcatgtaatctgaacccctctcccatttcatctcctatcactctgtatcccctcattattctgctatttttgtctgattgttgagcctattgccaagattgagcctgcctctgagtctttgttcttcaattttactctgtttggaatgttctacccccaggtttctgcagaactggtttcaagttcctactccttaaagagattttcttaaataactgaacctaaactgacctttcttctttctccttctttcctacagcctatcctctagtcattccttatcacattctgttttatttttatgccatttttctttgctttcagaagttatcaactcctacaccttggaagtccacagaagagtttgtgtatcttgattactacctgtaacagaagctatgcattcttcactcctatctctaaaggctgctctggaaatcacctgcaacttcagttgatggttctcatatattctaaagagctttctatctcaaaatctctcagcctgaggctattctctgagtattattcctagcagacaagaaatgccaggaagttaagggctcaaagtattaggatggtgcaaaattaactgtgggttttgctattaatacaacctttattccatagataaaatcaggaaattactatgtacacggctccttcattcttcaggtggccaattataaaggtgtgttctacatctttcacagtctccagcatgactgaaccctagctgcccacagtagaaaccagcttattcctgtgcatttcattgcctttcatttctctatctattttgttgttaaataaaacaaaatcacacccacttccctgtccccagtgcctgactggcctcatcatacatactattgtcctcttctctgctctttgttttcaacattttccttccccactgccttgtcttgtctccactagtaatcttctttctataacttccttctctaagccatatgcttttatctctcaccaatgtcctggatcactgtcttgaaggtggttatctccacacggcatttttgtctccaagtttcgataactaatacttcccttcatcccttcaggcctagagaaggtaacagttgcagggtacatacagaattatcccttttggtttatctatacactatctacagcttttaaattgctcttttattatattttattcaaattaaacaacttaagtgtattgtgcattttccctagtacattcattggtaccatttgcacattcaggttttagtgtatattcaaagagtgattttcctttctttcttcctatgagatttttcacttctttcttgaaatttgcttaaagaatacagcatatccaggttttaggggaaaagagactcagcactaaaaacaataatactttgctatgcactaaattcacaagaacaatttttctttatctatttctgcttcttttttaattcctagagaaaccactttttgtctgatgtctcttctttcctcagaaaccttatttttgttatagctcaaagcaaacctctcgggcttcccttttggaggcaaacctctttagagtaggataaagacattgtactcttatttacttctcttcagttttattttattttatgaggaattaaatgtatagagtgaaatatacacatattaaaggtataaacccatgtgacacacatcttaatctgaacacaaaacaaataaacttctctcatgcccctttccagtcagtattgctgcaacataaggcaactggtgatttggtttctgtcaccataagttagttctgccagttcttgaacttcatataaatgaaaccatagcacatgtaatctttgggtctagcttctttcactcagtgtaaagtttttgaaatttttctgttgctgtgtgtcttgatagtttgttctcttttgttactgaacagtgttgagtaaaagagtcaaactctgtaaaatatttggagagatttattctgagtgaaatatgagtgaccatggcctgtgagacagccctcttcaggagaccctgagaaaatgttcccaaggtggttggggttcaggttgattttatacattttagagtgttaaaacacactaaatatggcctgagaaggactccatacttatatatttgaatctttgtggacaaattgcaacctaacttaataagtagacaagattgaaaaacctaacttaagagtatgcacctgtaacaatagctgagtgttggccaatcccagtagccatacttcaaccactcttacactactgagtgttcaaactgtgttcaactaaggcaaatgctaagctgtaaccaatttagttgtttctgtacctcacctccaatttctgtacctcatttccctttttatgtatataactctttcaccacgtggctgtgctgaaatctctctgaatctgctgtgatttcagggactgctctattcatgaattgttgattgctgaattgaacttctttaaatttaattcagctgaagtttttcttttaacagatggtgtcagaagtgggatctgaagtagagccttaacaatctccaggactgctgagtgaacaagcaaggtacctgcaaggacctacttttgtcccttgatctctcaaagtggctggggatcatgggtaagttctctcagatttcagaactccatggatttgtgtttggaattctctgagtttctctgaacaaatttgtgatccaagcagtttgaaagtcaggacagaaactgaactaggtccaggttcaggttaaatctggtaattagctgacttggatccagctggaggcctctctctctctctcttttttttttttttttttttgagatggagtcttgctgtgtcacacaagctggagtagaggggcatgatctaggctcactgcaacctctgcctcctgggttcaagaaattctcctgcctcagcctcccgaggagctgtgattacaggtgtccaccaccatacccagctaatttttgtatttttagttgagacgtggtttcaccacgttggccaggctcgtcttgaactcctgacctcaagtgatctacacacctgggcctccgaattgctgggattacagacgtgaaccaccatgccagtcccagttagaggccacttacctttggctgagacagaaagaaaatattagtaaatggtaatattgcagtggttgtaaaatttggcttttagaaatgcacagggattcttgcgttctaccccttcatttcatttttcttgtgtacataggtagaaaaaaattattggctaagtcaatcaacggaacctaagagtaaaaccaatatcttaggtaaaaatgggttccttaatttttgaaaatctgagtttcttccatctttttattttttattttatttatttattcattataattattattattttgagacagagtctctctctgtcacccaggctggagtgcagtcgcgcaatctcagctcactgcaagctctgcctcccgggctcaagcgattctcctgcctcagcatcccaagtagctgggattacagacgcgtgccaccacgaccagctaatgttttggatttttagtagagacgggttttcacagtgttagccacgatggtctcaatctcctgaccttgtgatccgcccgcctcggcctcccaaaatgctgggattataggtgtgagccactgcgtccggcctaaagaaacagaattttattaatttatcagctgagttagcattacagtggcttacgaagcatttgccattgtttgaggttgcagtgaggataacatgaaacacctgaagaaaaaccttcacaaaacctggtctctttccaacagcttagctatgtgagaatagcttttataacatgacaaccctaaaaataaaaccattttaaacttaaagctgtccttccagttgctgtttcaaactttatcccaagaactgaagtgtcattcagtaaaaggcaactacaggcttctcagcagtaaggctaagtacttgttttatgttttctggtgatgaatttatttcttgtctttaagtttacagtgacagctataaaagtgattgtcaatagtattagtataatttaattactaatagaatgtgttttccatgtatgttttagtcagagctatgattttcttaataataccagaacttattttgtgctctatgatgatgacattagtgatctgtattctcagcagtattttacagtgcttcagactattaatacactaatctgtgtttttggctgggtgttgtggctcaagcctgtaatcccagcactttcacaggctgagacgggtggatcactcaagctcagaagttcgagacaagtctgagcaacattgtgaaaccccctctttactaaaaatacaaaaattagttgggcctggtggtgggcacctgaaatcccatctatttgggacgctgagacagtagaatcatttgaacccaggaggtggaggttgcagtgagctgagatcgcaccattgcactgcagcctgggcaaaaagacggaaactccatctcaaaggaaaaaaaaaagagtaaatagtaaaatcgggtatggtggctcatgcctgtaatcctagcactttgggaggctgaggcgggtggatcacctgaggtcgggagttcgagaccagcctgaccaacatggagaaaacccgtctctactaaaagtacaaaattagtcaggctaggtggtgcatgcctgtaatcccagctactggggaggatgaggtagaagaatcacttgaacccgggaggtggaggttgcggtgagccatgatcacaccattgcactccagcctggacaacaagagtgaaactacatctcaaaataaaataaataaaataaagagtaaatagtattcctttatgtgtgtgcatgtctgtgtgtgtatgtgtatatatatcacattttctttatccattcatctaatgctggcctcctaggttgctttcatatcttagctattatggatactgctgcagtgaatatggtagtgcagttatctcttcagtatgctgatttcaattcctttagctatacacccacaggtgggattgctggaacatacagtaattctatttttaatttctgatgaatctccatgttattttccttaatggctctattcatttatgttgggaaatataattacttttttttttgagacggagtctttctctcccaggctggagtgcagtggtgtgatctaggctcactgcaagctccacctcctgggttcacaccattctcctgcctcagcgtcctgagtagctgggactacaggtgcccgccacctacctggctaatgttttttgtattttcagtagaatgatgttgggaatggactggtttattcaataaatcgtgttaggtacattgactaatagtgtgtaggattgaagttatatttactgaattctttaaggtatagtcaaaacagactgaataattaaatgtaaaaatgatctggagaaaaccttcttgttttgtttttttgagatggagtctcactctgtcatccaggctggagtgtagtggggtgattttgactgactgcaacctcagtttcccaggttcaagtgatactcctgcctcagcctcccaagtagctgggattgcagacatgtgctgccacactagaataattgtatatgttttaaaataggaatagattttctaagctaaactgaagataaatgctaaggaaatagtgagatttcacttgataattatgtgtctgaatgaatcagccaattaataaaatgaaaacaggtcaagggtagtggtgcctgcctgtaatatgaccaccttgggaggctgaggcgggtggatcacttgatgtcaggagttcaagaccaacctgacaaacatggtgaaactccatctctactaaatacaaaaaagtagcctgttgtggtggcacatacctctaatcccagctacttgggaggctgaggcaggagaatcacttgaacctgggaggtggaggttgcaatgagcagagattgagccattgcactccagcctgggcaacaggagcaaaactctgtctcaaaaaaaaaaaaaaaaaaaatcactgcctcaccaactttttcacatagaatgattaaggattccagagcccatgctacctctaggggctcctgcccctcccacatcacacatctatcttgacacggctagttacagagaagaaaaggcccagtaaattaatatcacaatcattgccacatacccaccaaaatactcaaattaaaattttgacaaaattaagtaccaacaagaatgcaaagatttgggaattatcagatattgtaagactgtcagttggtgtgctaacattgggatgaaaccaataatagctagtaaaatggaagatatgtttgccctgtaacctatggtttcacctcttgttttatactgttcactatacacactatacacactaatggtaaccaaatagaaatacacaaatgttcacaacagcatcatttgtaactgacaaaaatgaacacaacccacatgtccaccaacaatgaagggatacacactggtgtactgtatttttatttttatttttatttttatttttatttttatttttgagatggggtcttgctcagtcccccaggttggagtgcagggcgcgatctcggctcactgcaatctctgcctcccaggttcaagcaattctcctgcctcagcctcccaagtagctggtcttactgatgggtgccgccactcccagcaaatttttgtattattggtagagacagggtttcaccttgttggtaaagctggtctcaaactcctgacctgaggtaatccacctgtctcagcctcccaaagtgctgggattacaggtgggagccaccatgcctggctttttttttttttttttttttttttttgagactgagtctcactctgttgtccaggttggagtacagggtgcagtcttggctcactgcaacctccaccacctcccaagttcagctgattctgctgcctcagcctcccgagtagctgggaatacaggcacgtgtcaccacgtccagctaattttttgtatttttagtagagatttggtttcaccaagttcgccaggatggtctcgatctcctgacctcatgatccactggcctcagcctctcaaagtgctgagatgacaggcattagccaccgcatggcctaatttttgtagttttagtagagatggggttacaccatgtaggctagggtggtctggaactcctgaactcaaatgatctgtctgcctcggcctcccaaaatgctgggattatagacgtgagccaccgtgcctggctgtgtactgttttaatagaatgcagaaataatgctaaatgtgaatattaaatacttaatattgagtaaaagaagccagatgcagcagaatacagacttttactccaattatgtaagagaaaaaccaggcaaaaccagactttactttaggcttttaaaaaatgcataataaggccaggcactgaggtcaggagtttgagaccagcctgaccaacatgtgaaaccccgtctctactaaaaatacaaaaattagactggcatggtgacacatagcccatgcctgtaatcccagctatttgcgaggttgaggtatgagaatcacttgaatccgggagttggagtttgcaatgagtcaaaatcaggccactactctccagcctgggtgacagagcaaggctccatctctaaaaaaaaagaaaaagaaaaggaagaataaatacataataaaattataaagagaaccaaggagagaaacgcagatatccacaggtaatgtgggtatctgttatatctgttactaataagggaaggaagactttaggatgagttaggggcatacagaggacttcttggtggtgatagtgctctatttcttcacctggataggtatcacacagacgtttatttaataactgatgtatccatatgtttgtttgcatatttcacaataagaatgaaatggaggaaaggaacgtgaatggaaagagatttctccattcatcaaaattttaaagtcatatttttcctcaggttcttctccaggttcagtctgaaatggtgaaagcagccaagtgtggtggctcacgcctataatctcagcacttttggaggtaacagagtaagactctgcctaaaaaaaaaaaaagagaacaacagagtggttatcaggtagagaggaagggaggaaataaggacatgtgggtcagagatacacagtagcagatatgtaggatgaacaatcctatacatctatatacaacatgaggactataggtaataaaattgtactgtatatgggattcctgctaaataagattttaccttcccttgccacaccaaaaactgtgggtatctgtgatagatatggtaatttgcttcactatagtaacctttttactatgtatatgtattctataacatcatatgtgtaccttaaatatacacaataaaatttattttaaagagaaaaaattggccaggtgtgatagttcacgatggtaatcccaaaactttgggaggccgaggcgggcggatcacaaagtcaggagtctgagaccagcctggccaacatggtgaaaccccgtctccactaaaaacacacacaaaaaattagccgggtgtggtggcacacacctgtaatcttagctactcaggcagttgaattgcttgagcataggaggcagatgttgcagtgagatgagatctcaccattgcactccagcctgggtgacaggctgagactccacctcaaaaaaaaaaaaaaaaaaaaaaaaaaaaaaaaatatatatatatatatatatatatagagagagagagagagagagagagagagaaattatgaaagtatgcacaactaaattaaaatgtcaactctaaagtgagctactgagtgactggggtgcatgagagaaaaggttacttaacatttttatacctattgaattgtatcctatgtatgcattataaatttaaatgtgcaataatgcagataactgacatgtgggtatgctttgattaggactttgcatttcccttttgctcaaattccttatgattctagatgcgtatgaatagaaatacaaaatgtaaggagacatgggacttctgatagccctttcttctttccatgttttgtgtctctggttgtagtttgccatatgagtccatatggctaatgagcaaaatatttttcagatggatacatgtgaccaagcattgcaagttaaagatatttctgaatcttggacctcttatttacagtgaagccccctcatgcatagtaaagcagagaggaatgtaaaaggttgctgcatcgataatcaatttctggtgagcaataattataggtaatgtaaaatgggacaattattgcttttcatcatatcttgaaagaactcttacagtccatgattttgaaaaaaaaaatctaagttcactctttttttttctattaaaaaaagacattatcctgtagaagttcaagagtaaaatctgaaggcagcttatctgacctggccacatggtcttgccacttgttaaatataactttctacacactaacttctccagacctcagatcttcaactctctaaaatggaaacctagtagtatttgtctctagacctgcagctgaactgagcattttagggaaggaacaaacatacacacgatatatatatagtcagattatgaacccagtgtagcccagaatgcaaaaatttctcagtaacagagatccccaagagaaaaatgtgatttagtttatctcagtggcctttcatgtggcaaatgaaaagttaaagtccataatgagaaatatatgggcagccagtgacaccatccattcaatgtagactctcaacatctccgacagtcattccctgttgtaccccaacctgcttatatattggggtgatatcaccttttgatcataacgtacataaacctcaagcctcagtaataaatatttatggacaatcagatattctgtgtttccagtcaaaactcaggtagatcacattttatgtgacaggagaaggaacagttgatgcccagttaaccctgagatcatctctgtctgcatcttcctatcatcatagcaagctctttctctgcagtccaccgtctgtatctgccctttgctatatagatagcaaaaataagcatctgaaaagttgctcaacaccatatgtcaccagggaattcaaattaaatcaatgatgagataccactacacatctattagactggctcaaatccaaacgctgacaccaacaaatgctgatgaggatatggagcaacaggaactctcattgattgctgctgggaatgtaaaatggtaaagccactgtggaaggcagttttgcaaattcctgcaaaactaaacatatgcttaccatatgatctggcaattgcattctttggtatatactcaaatgacttgaaaacttatacccactcaaattctgcacatgaatgtttatagcagcttatacatgaccaacaaagattggaagtaaccaagatatcctacaatagggaaatggataaactaactgtgaagcattcatacaatggaatattcttcaggaataaaaagaaatgaactaccaaggcatgacaagacatggaggaatcttaaacacgtatttctaagtgaaagaagccaatgaaaaaaggccacatagtgtagagttccaattatatggaatactagaaaaggcaaaactaggcagatggtattataaaaagttcagtggttgccaggggcttgagcagagggaaggatgaataggtggaacacagaagatttttagggcagtgaaacttttctgtgtgaccctatagtggtggatatatgtgcttaagcatttgttgaagcccataaatggtagaacacaaagagtgaatcttaatgtaagccatgaacttaataatatcaatattggctcatcaagcataacaaatgtaccacactaacaagatgataatagaagaagtgtgtgtactgtggtgtgaggcagatattaagctcaatatgccttctgctctatttttctgtacacctacaactgttctaaaaattttcaattatttatttgttaattattattttctaatatatttttcgagatggagtctcactctgttgcccaagctggaatgcaacagcatgatcttggcttactgcaacctctgactcccagcttcaagcgattctgctgcctcagtctcctgagtagctggaattacaggcacccgctaccatgcccagctgactttttgtatttttagtagagatggggtttcaccatgttagccaggatggtcttaatctgctgacctcatgatccacccaccttgccctctcaaagtgcttggattactggtatgagccatcgcaccaggtcttatttatctttttgagacaggttttagctctgtcactcaggctggagtgcagtggtgcaatcgtggctcaatgcagccccagcctccagggctcaagtagccatcccacctcagcttactgagtagctgggaccacaagcgtgtgccaccatacctggcacatttcttagacctctgaaaagatgctcaacaccatatgtcactaggaatatttagtattcaactagaggcttcaatgggctctgaaatatcccctcctgaactctataaaaagcatgtttccaacaagctgaatgaaaacaaaggtttacatctgtaagatgaattcacacatcagaaagcattttcaccaagaacttttctagttttatagcaggatgttcattgtttcaatattggtctcaatgggctccaaaatgtccctttgtacagtctacaaaaatttttgccaatgtactgaatcaaaacaaatgtttaacactgtgagatgaattttcacatcaccaaacatttttacagataatttgtatctagtttttaatcacaaaactttgaatttttcactataagcctcaaagggctctaaattgtcccctcttagcttctactaaaagagagttttgaacctactgtgtagaaacaaaagtttaactatgtgaaataaatccccacattgcaaagctatttctcagatagcttgcttctagtttttatcacgaattattcagcttttcactgtaggcctcaatgggctccgaaatgtcccttcatacattctacaaaaagagtgtttccaacttagctgaatcaaaagaaattttaaactgtatgagatgaaaccgcaaattgcaaagcattttcacatatagcttctatagtttctatcgtataatattcagtttttcactacaggcctccatgggctatgaaatgtcccctcataggttctataaaaaggtgtttccaacatgctgaatgaaaacaaagatttaactttgtgagatgaacccacacatcacaaaccatttttatagatagattttctctagtttttattgtggaatattcaatttcatgctacaggcctcaatttgctccaaaacttccccttgtagattctacaaaaagaatatttccaacctgctgaatcaaaagaaatgttcaattctgtgagatgatatgcaaagctttttcacagacagcctgtttctagtttttatcctggggtatttgatttttcactgtaagcatcaatgggctctgaaatgtccctttgtagattctacaaaaagagtgtttccaacctgttgaatcaaaacaaagttttaactttgtgagatgaacccacacatcacaaagcattttcacccacagcttgtttctaatttttaccatgggttatttgtttttcactaaatgcctcaatggactatgaattgttgccttgtagattgaacaaccaaagagtttccaacctgctgaaggaaaacacaggtttaactttgtaagatgaatctacccattgcaaagcatttttacagataggttgctttgagtttttatcaagagatatttgatttttcactgtatgcttcaatgggttatgaaactccccttgtagattctacaaaaaaagtttccaaactgatgaatcaaaagaaaagttcaacttttgagatgaaatcacacaacacaaagtattttaagaaatagcttctttatagtatttatcgcaggctattagattttccaatattagcctcaacaagctctgaaatgtccctttgtagattgcacaaaatgagtgtttccaacctatggaataaaaaggaaggtttaactctgtgagataaatccaggcatcacaaagcatattcacagatggcttatttctaatttttgttgtgggatatttggtttttcaataaaggcctcaagcactccgaaatgtccctttgtagattatataacaagagtgttttatggctgcatagtattccatggtgtatatgtgccacattttcttaatccagtctatcactgttggatatttgggttggttccatgtctttgctattgtgaatagtgccgcaataaatatacgtgtgcatgtgtctttatagcagcatgatttatagtcctttgggtatatacccagttcatgtcctttgtagggacatggatgaaattggaaatcatcattctcggtaaactatcacaagaacaaaaaaccaaacaccgcatattctcattcataggtaggaattgaacaatgagaacacatggacacaggaaggggaacatcacactctggggagtgttgtggggtggggggagtggggagagatagcattgggagatatacctaatgctagatgacgagttagtgtgtgcagcgcaccagcatgtcacatgtatacatatgtaactaaactgcacattgtgcacatgtaccctaaaacttaaagtataataataataaaaaaagagtgttttaaaagtgctgaatcaaagcaaatgtgtaactctttgagaggaatccacacatcacaaagcatattttcagatcacttgtttctagtttttaaagcatgatattcggtttttcactatatgcctcatcaggctcagaaatgtctcatagtagattttacaaaaatagtgtttcctacctgctgaatcaaaacaaccgtttaaatctgtgagatgacgccaaacctcgcaaagcattctcacagacagttttttcctagtttttatcgcaggatattcggtttttcagtataggcctcaatgaactttgaaatgtccattcataggttctataaaagtgtgttcccaactccctgtataaaagcaaaggtttaactctgtgaaatgaatctacacattggaaagcacaaaaatagcttgtttctagcttttatgatgagacatttgattttttactattggcctcaatgggctcagaaacgtctctttgcagattctacaaaaaaagttttttcatttttctgaacaaaaataaaggtttaactctttgatatgaaatcacacatcacaaagaattttcacaaatagcttttttctagggttcatcactggatattgggtttttcactataggcttcaatgcagtcttaattgtaacttcttaattctacaaaaagagtgtcccccaacctgctgtatgtaaataaaggtttatctctgtgagataaatcttcacattgcaaagcattttccccaatagcttgtttctagtttctatctcgggatattgatttttcactataggcttcaataggctttgaaagattcctgtgtagattccacaaaaagagtgttgtgacctgctgaatcaaaacaatgtttaactttttgagataaatccgcacatcacaaagtattttcacagatagtttttttttttttttttttttcagatggagtctcactcagtcgcccaggctggagtgcagtggtgtgatctcggcttcccaggttcacaccattctcctgcctcagcctcccaagtagctgggactacaggtgcccgccaccacgcctggctaattttttgtgtttttaatagagacagggtttcaccgtgttagccaggatggtctcgatctcctgactttgtgatccacctgtctcagcctcccaaagtcctgagattacaggcatgagccaccgcgcctggccaatagctttgtttacttttattgtgggatattggtttttcactacaggctgatattggcttcaaattgtaccctcatagattctacaaacagtgagttttcaagcatctgaagcaaaataaaggtttaactttgtaagatgaatcctgcacattattgctggatattcggtttttcactgtaggcatcaatttgctctgaaatatcctattgaagattttaccaaaagagtatttccatcctgctgaatcaaaagaatggtttaattctgtgagatgaaatcacccatcgtaaatcattttcagagacagcttcatatagtttttatctcagaatattcggtttttcactataagcctcaatgggctttgaaatacatcctcatagattgtacaaaaaaaaaaaaggagtttccaaacagttgaatcaaaacaaatatttaatgttgtgagataaattcaaatatcgcaaagcattttcacagttttttttttctagtttttatcatggaatattcggcttttcactgtagtcttcagtgggctcagaaatgccctttgtagattccacaaaaagaatgtttctaacctgctgaaccaaaacaaaactaactctttgaggtgaatccacacattgcaagcattttcacagatagcttgtttctagttttgatcacggaatattagatattttacaatagacctcaatgggctcagaattgtccccgcttagattctactaaaagagtgtttccaaaatgctgtataaaaataaaggcttaacactatgagatgaatcaacacatcacaaagcattttcacaagtagcttgtttttactttttgtcgtgagatattcagtttttcaatatattcctctatcggctctgaaatgtcccttcatagattctatgaaaagagtgtatccaactgactgaatcaagacaaaggtataactctgtgtgagaaatctacacatcacaaagcattttcactgatagcttgtttctagtttttatcatgggataattggtttttgactataggcctcaatgggcttcaaagtgtccctttgtagattctacaaagagtgcttcaatcccgctcaatcaaagcaaagatttaattctctgaaatgaatctacacatcacaaatcattttccagtatagcttgtttctattttttattgtgggatatttgatgttttactttagacctcaatgggctctgaaatgtgccttcttagattctacaaagagtgtttctcacctgctaaatcaaaacaatggtttaactttgtgagataagtccacacattgcaaagaatttttactaatagcttatttctaatttttatcatgggatattcaattttttcagtgtagtcctcaatggtctctgaaatgtcccctcgtagattctacaaatagagtgttgcaacctgataaatcaaacctttaattctgtgagataaatctataaatctacacatctcaaagcattttcacagatagctggtttctggtttttatcacgggatatttgatttttcactatagacctcaataggctctgaaatgtcccctcatagagtctacaaaaagagtgttttcaacctgctgaataaaaacaaaggtttaactctgtgacataaaataacaaatcataaaacattttcacagttggcttgtttctagtttttatcacgcgatactcagtttttcatggcagggcacaatgggctccaaaatgtccctttgtacattctacaaaaagagtgattttggcctgctgaataaaaacaaaggttttatactgtgagaggaatccacacataggaaggaattttcacagatagcttgtgtctagttttcattgcaggatgttcagttttttcatatacttcttgatgggctctgaaatgtctcttcatagaccctacaaagagagcatttacaacctgctgaataaaaacaaaggtttaaccctgtgagttgaatccacacatcacaaagcattctcatatatagcttgtttctagtttttatcttgagatataacgtttttaactttaggcattaatgttctctaaaatgtgtcattttagtttctacaaaaacagtgtttcaacctgctgaattaaaacaaggtttaactctgtgatatgaattgacacatcacaaaatattttcacagatagctttttactagtttttgtcatgggattttcagtttttcactaatgtctttcatgtactctgaaatgtccctatgtagattttacaaaaagagtgtttccgacctactgaatcaaaacaagtgtttaaatctgtgagatatatccatacattgcaaagcactttcacagattgctagtttctagcttttatcatgagatacttggtttttcactatagacctcaataggctcccaaatgactctcacagattgtacaaaaagagggttttcaaagtgctgaatcaaaataaagatttaactcagtgaggtgaatccacacatagcaaaatattttcacagatagcttggttttgtttgtttgttttgtttttattgtgggatatttcatttttcactataggcctcaatgggcaccaaaatgtcttctcctagattctacaaactgactgtttccaacttgcttaatcaaaacaaaggtttaactctgtgatatgaatatacacatcccaaaggattttcacagatagcttatttctagtttatatcttctcgtattttgtttttcactgtaggtttcaatgagttttgaaatgtttcttcgtagattgtgcaaaaagagattttaaagctgccaaattaaaacagatgtttaactctttgagatgaatccacacactgcaaagcattttcacagatagcttgtttctagtttttatcatgggatatttggtctttcactgtagtagtcctcaatggactctgaaatggcccttagtagattctacaaaaagagtgtttccaacctgctgaatcaaaacaaatgtttaactctgtgaaaggaatccacacaacgcaaagcattttcacagatagcttgtttgtagtttttattgcaggatattcagtgttttaatgtacttgtccatgggctccgaaatgtcccttcatatattctacaacaatagtgttttctacatgctgaaaaaataacatatgtttaactctgagagatgattccccaaatcacaagaccttttcacagatagcttgtttctagttttcattgtgggatatttaacttttcactataggtctcaatgagctttgtaatgtccttttgtacaatctgcaaaaagagggtttccagcctgctgaatcaaaacaaaggtttaactctgtgagatagatccacacattgcaaaacattttcacagatatcttctttctacttttcattgtaggatgctcactttttccaaatacttctccaggggttccatattgtcccttcgttgattccacaaaaagagtgtttccaaccagctaaatcaaaacaaaggtttaactctgtgagttaaatctacatattgcaaagcattttcacagatagcctgtttctcatttttatcacaggatcttcagtttttcaccataggcctcaatgggcactaaaatgtcttctcatagattctaaaaacagactgctttcaacctgcttaatcaaaagaaagctttaactccatgatatgaatccacacattggaagcattttcacagatagcttgtttgtagtttttttctccacatattttgttttttactataggcttcaatgggctttgaaatatttctttgtagattctgcaaaaagagtgtttccaaactgcatatttaaaacactggtttaactctgtggcatgaatccacaatggcaaggcattttcacagatagcttttttcttgttttttttaggggggagggtgggggaagatatttggtctttcactgcaggtctcaatgggctctgaaatggctcttcatagattctacataaagagtgttcccaacctgctgaatcaaaacaaatatttaactctggaagatgaatccacacatcacaaagcattttcagttatagacttttattgtttttattgtgaaatattctgctttttaatataggcctcaatgggtgtgaaatatcccttcatgtattctataaaatagagttttcaacctgctgaataaatgcaaaggtttaaatctgtgaggtgcacccacacattgcaaagtgttttcaaagacagcttgtttctacttttatcatgagatattttgtatttcactatgggcctcaatgggcttcaaactgtccctctgtagactctacacaaagagtgtttccaatctgcttaatcaaaaaatgattaactctgtgagatgaatccacacatcacaaagaacttttactgataacttgtttctggatgttatcatgggataatcattttttcattaacctgctgaatgacaagaaagatttaactctgtgagatgaaatcacacatcgcatataactttcagacacagcttttttgtagtttttatcacaggacattaagtttttctctacaggcttcaatggactttgaaatgtccttgtgtagattgtacaaggagagtgtatccaacctgctgaatggaaacaatgtttaattctttgagatgaatccacacatcccaaagcgtttttacagataggttgtttccattttttatcatgagatattagggttttcactataggtttcaatgggctctgaaatgtttctttgtacattctagaaaaggagtgtttcaattctgattgaactgagtgttctgattctgccgaatcagaagaaagttttaactctgtgagttggatccacactttgcaaatctttttcacagatagcttgcttctagtttctttcatgggatatttggtctttcactataggcctcaatgggctctgaaatgtttttaagtagaatctacaaaaacagtgtttccaaactgctgaattaaaacaaagttttaaatatgtgacattatttcacatatcacaaagcattttcacagataacttgtttgtagtttttatcacgggatattctgtttctcactataggcctcaggggttcaaaatgtctttccttagatttacaaaaaacgtgtttctagcctgctgaatgataacaaatatttaactctgtgagatgaatccagacactgccagtcgttctcacagatagctgttttctagttttgtgtgtgagggatattcgcttttttacaatatgcctcaaaggtctcagaaattcccattcgtagattcaacaaaaagagtgtttccaaattgctgaattaaaacagtggtttaactatgtgagatgaatccaaacattgcaaagcatttggacagatatcttctttctagtttttatcacaggataattgatttttcattatgggcctcaaaggtctttgaaaatgctcttcatagattctacaataaaagtgttttcaacctgttgaatcaaagatttaactctaggagatgaatcaacacatcacaaaccatattcactgataccttatttctagtttctatcatgggatattcagtttttcactgtatgcctcaaagggctccgaaatgtccctccaaagattctacaaaaagagtgtttccaaaatgctaaataaaaaaagtttaactctgtgagaagaatccacacatcacaaaacattttcactgatagcttgtttttagttttcatcgtgtaatatttgatttttgtgtttgtttgtttgttttactataggccccaatgagctctgacattttttctttttagattcaacaaaaagagtgtttccaacctatggaatcaaaagaaaggtttaaatttgtaagatgaatcgacacatcacaaagcatgttcacagatagcaaacttctagtttttttccgcaggatattgtttttcactgtaggcctcaatgggctttgaaaagtttattggtagatactacaaaaagactgttttcaacctgatgaatcaacagaaaggtataactctttgagatgagcccacacatcctaaagcattttcgcacatagcttactcctagtttttatcatgagatattctgtttttcactatagacctccatgcgctccgaaatgtccctttgtagattctacagaaagagtgtttccaaattgttgaattaaaacaaaggtttaactgtgtgacattatttcacagatcacaaagcattttcacagatagcttgtttctagtttttatcgcaggatatttggttttaaactccaggcctcaatgtgcttcaaaatgtctcatcttagattctacaaaaaaacatgtttccaacatgctgaatcaaaacaaaaagttggctctgtgagataattccatgcctcgcaaagccttttgacagatagcttgcattaagttttcatcacgggatattccatttttctctataggcatcagtgggctccaaaatgtccctttgcagatcctacagtgaaagtgtttctaaactgctgaattaaaacaaagatttagctttgtgagataaatccagacatcacaaagcatttcactgatagtttgtttccagtttttatcacaggatagtcagtttcttactataggcctcaatttgctctgtaatatcccctcttagattccagaaaaggagagtttccagcctactgaatcacaagaaatgtttaactctgtgagataaaatcacacattggaaagcattttcagacatagtttctttgtagtttttaatcgtgggatatttggtgtttccactataggcctcaatggattttgaaattttccctcatagggacacaaaaaaagtgtctttatccttctgaatcaaaacaaagttttaactgtgaaaagaaaatccacacatagcaaagcattttcaccatatctgccaacaaggaaactcttgttctcccactcttatcagagggctgcatgattcctataggatgagaagcaggcagcggtgtcaggatttgcctggtcatctaggctctgttacagtcatctacatgttctttttcactgtggaggggatcttttattgatctgttgctacgggggactgcctctctctacagatcttttggctgccagggatttcagggagtaaaaagtacttcgggtaggctggctgcactccaggttgtgagtagtggtctcactgtgggggattggggtgtttgcaggaggcttttgggtcctctggcaggaatccttgaacatggcttggacgctagcacaggccctctcattctccaaggcaagaattgattttccattgctttcatgaggagtccatactactcttcatcagcgctcctaaacacactttttttggcttgcaattgcctcagacggcgactgagacactctctgaactgcatctgcactcgtgaggtctgttcaaagtgtgagacttctgcttcaccttcaacttgcctttgtcatagttcctgcctttcccagagagccatgttgagtagtaggagcccctgtgaggcccaggatgaagggaggcagtgagctcaagggccctgccattttctgctgacatctgcctctggggtttttggtatgatttcatcacctggacaccccttaacatctcagcagactgtattcccttcccccatgggacccaattcttgcacacagcctctttggggaatggaatcagaggaacagtttccagcgccccacatcacagtctccaagtgcctccttctccagcgggacctgaccatgaagatggcccgaatgggcctgcctggagggtgtgggggtgagtctttttgaaatgtgcccctctccgtgatatctaggtacagtctgcctgtgttccccaggctgctctctccaaagaggagcttcctgcagaaacacacagcctctgaagctgctgggatgtgtgtttctgtgggagtgtttcaagttgtggatatgtgtgtggctgcggtcatgtgagtgtgtgtgtgtgtgtgtgtctgtgtgtggaggtaagtggagtctgctgaaagaaatgtggctaacacactgcagcactgtttttgtcaccccatcttccggtggcctgtctctgtggttctgcttgggctgaagttctccatgttcttcatttttccatggctcctgaatccacagtgaattggaagaatggctgacaactgccaggttcaaaatcacctccccttgccaaaaagccacatttctacaaagaagagaagcacaccacaccccaaaacagacaactccccatgctttattgttctgtggccaacccagggccagaccccagcagtccagtcacagggcttcttgaatttacctcgatttttgtttgtagctgagcaggtgcttcaggtcatcagggaggcactcctccattgtctcagaattttattgtgggacacagagtgtgagcaacaataaggtcagataggggtgaggatacagtctgttgaggtgtggatgagatctcgcaccttcacctgcaaaaaaggttcagacagatgacacagaagttgcttccaactgcatcccctcattccgttcattgcacagtcaacagcatggcctggtgcccaggtgggatgactcaatcgtgcagggaaaagttggattgcaaaatggggcccttctggccagctccagaattgagcttccattcccagagccacattggagtgagatggactgatgctgggttggatgtggcctccacactggcaacctattttcctgacttccatgttccttatgggcctagagtttcctaggtctggctcagtctgacttccatgttcctcatgaacctggggtttttctgggtctggctcaaagtcttccacactaaaagtttcccagttcatggaggataattctcatgggaatccatcgcatgagtgttttcttataaacactgtcacattttaattactgggcagttgtgatacttttggaatcataaatttcgattatatccaccatcaagataacttgttctcccacttctaaaggacagctgcatgactcctgtaggatgagaaacaggcagctgtgtctggcttttacctggcaatctaggctctgtttcatgtcatctgcacttcctttctcattgtggatggggtatttcattgggctgttggtgggtgggactgactcattgtggatattttggttgccaggtatatcagaaagcaaaaggtattttgggtaggctggccacacaccaagttgtgggtagtggtctcataatggtggctggcattgtttacactttgcaggaggcttttaagttctctggcaggaaaccttgaacatggcttggactcctgcacaagtctgctcattctcccaggagaaccttgacttttctttgctttcatggggggtccacagtgcccatcaacagcactcctggatgttattttcaggtttcaaaatgccccagacatcctctgagacactctcttaacctcatgtgcacctgcaagaggcctgttttaggtgtgagaacagtgctccaccttggacttgcctttgtcatggttcctgcctttaccagagagccatgctgagaagcaggagcccctgtgaggcccgggatgaagaaaggcagggggttcaagggcctggccatcttccactgacacctgcctcttggatctcagatattattccatcacccagagacctcttaacaactcaccagactttattcccatccccaggagaccgaattcatgcacacagcctcttttgggaatggagtcagaagagcagtctccagagcccacctcacagtcttcaaactcctccttctcctgtgggaccctaccacggagatggctcatgaaggccctatgttggagactattagcatgcagcagttggttgctgcaggcagcctttttctggaaactaggccagctctggctgtaccattttcctgagctttgccaggcttacagccctgacagccaggtgcctgagcctgctttgtgaatgcgcatgtgacagtcaggccaccaggcaccagtggtgagcagcggctcacatcacagtgaatgccaccattgcctagtgataagtcccttcatcttggtggagaaggagtcctctgtggctgtgtgtcggcattgaactatcacctgtctactttgagggctctatgggatattcccacaatcctaggagtgggcagtggcgagccagcctgaagacacatcaagtggagccccaggaataaaccacaaaatccctaaggatccaaaaggatacccacgatgggtcaggcctgcctaggcggtgtgggagtgagtctttttgaaacttccctccctgtgatttctaagtacagcccgcctctgttttccagggctgctctctctcagaaggggctttctgcagaaccgtgcagcctcaggagctgtcagtctgtgtgtttctgtgggagtgttgtgagtgtttgaatgtctgcatgtgtgtgtgtggctgtatgtgtgtttgtgtgtgtctgtgtgtggggggggggacatctgctaaaaggaatatgtttaatgcactgcagcgcttttttttttttgagtcccttcaccttctggtgcacctgtctgtgtggctctgcttggcctatggggctgcatgttctttgtttttctgtgcttcctgagtccacggtgagttgggggggatggttgagactcacaggtgtacaaatcacctcctcataaaaaggagccactcttctagaaagaagaggagcacaccactctcaggagaagacacctgtccgggcctcattgtcctgtggccaacccaggacaggaccctagcagtcctgtccacaggccgcttaaatccaattcgaatttggtttgcagccaagcaggtgcttcacgtcatgaaaggagcactcctccaacatcttgggatttcattccagaactaggattgtgagcagcaataaggtcagatacgggtgagcatacagtctgctgaggtgtggatggggtcctgcaccttcatctgcaaaaaaaggtgcagccagatgacacaggaagtgcttccaactccatccttgcattcccttcattgcacaagctgtccacaacatggccctgtggtcaggtgggaggactccaacttgcagggaataaaaaaaaaggtttaactgatacaaaaaggtttatctctgtaagatgaatccacacatcgcaaatcatttgcaaagatagcttctttttagtttttatgccgggatattaggtttttcagtatagtccacaataggctctgaaatgtcccttcatagattctacaaaaaaggtgttttcatcctgttgaatcaaaacaaaggtttaactctgtgagataaatccacacttcacaaagcattttcacagatagacagtttttagtttttactgtgaaatatttcgtgttttactttagtcctcaatgttcacaaaaatatctttttttttgtatatgctatataaagagtgttctcaacctaccgaatgataataaaggttaaactttgtgagatgaatccgcacatcacaaagcactttcactaatagattgttgctagtatgtatcgtggcatattcactttttcaatatacttgtcaatgggttccaaaatgttcctttgtagattctttaaaaagagtgtttccagtgtgctgaatcaatataaaggtttacctctgtgagatgaatccacacaccaccaaccattttcaaatattgcttgtttctagtttttattttgaaatattcattttttcactataggcctcagtgagctccaaaatgtcccttcataggttgtacaaaaagagtgttgccaacctgctgaatcaaaacaaaggtttaagtttgtgaaacaaatccatatatcagaaagcattttcacagatagcttgcttctagttttaatcactggtattaggtttttcagtataaccttcaatgtactttgaaacgtccctttgtagattctattaaaagaatgttttcaacctgctgaataaaaacaaaggtttaactctgtaagatgaacccacacatggcaaagcatttacacagatagcttgtttctagattttattgcagaatattcaattttccacagtaggcctcaatgggttctgaaatatccctttatagattctacaaagagtttttccaacctgctgaatcaaaaaaagttttatctctgatagatgaattcccacatcataaaacattttcacagatattttgtttctagattttatcacaggatattagatttttctctataggcctcaatgggctcagaaatgttccttcccagattctacaaaaagagtgtttccaacctgctgaatcaaaataaaggtttatctctgtcagacgaatgaacacatcacaaagcattttcagagataacttctttcaagtttttatgataagatatttggttttccactgcaggcctcaattggcttcaaaatattcctctgaatgttcttcaaaaagattgttttcgacttgctgtaataaaacaaaggtttaactttgtgacagatagcttgtttcctgtttttatagcagaatatttggttttacaactataggcctctatgggctgtgaaatgtcacttcatagattctaaaaaagagtttttccaacctgctgaatcaaaacaattttaactctcagttgaatccacacaacacaaaggattttcactgatagatttttctagtttttatcaaggaatatttgttttttattgtagttctcaatgggccttgaaatgtcttttaacacattccagaattagactgtctgcaacctgcagaataaaaacaaaggtttaactctgggagaagcatctgtacatcacaaagcattttcacagatagcttataactagttttcattgtgggacattcgattttttaaaagagacctcaatgggctataaaatgtccctttgtagattctccataaatagtgcttccaatctgctaaatcaaaacaaagctttaaccttgtgatatgaatccactcattgcaaagcattttcacataaaactttttctagttttcatcatgggacatttgtatttttgctacagtcctcaatgggctccaaagtgtctcttcataggttctactaaaaaaaagtatttccaacccgccttccatagattttccaggaacagtgttttcaacctcctgaatcaaaacaaagatttaactctgtgtgatgaatccagacatcagaaagctttttcacagatagcttttttctagtttttatcatgggatattggtttttcactacctgccaatatgggctccaaattgacctctcatatattctacaagcagagagtttccaacctgctgatgcaatacaagggtttaactttgtatgataaaactacacatcacaaagcatttttacagataccttgtttctagcttttatcacaatatattctgtttttcactacaggcctcaatttgctctgaaatgtcctgtcgtatattctacaataagaatgtttccaacctgctgaataaaaagaaagatttaactctataagttgaaatcacacatctcaaagcattttcagagacagcttctttatagtgtttattaggattttaggtttttcactacaagcctcaatcaatgggctttgaaatatctcctcatcaattgtacaaaaagagagtttccaacctactaaatcaaaacaaaggtttaacattgtgagacaaatccacaaattgcaaagcatttttacagataacttgtttctagtttttatcacgggatatttgatttttcactataggcctcagggggctaagaaaagtcccctctttgattctacaaaatgaatgtttccaaactgctaagtttccaacctgctgaatcaaaactaacattcaactccattagatgaatccacacatctcaaagcattttcacagatagctagtttctagttttcatcgtgggatattcagttttttactacaggcctcattgggtttgaaatgtacccttgcagattctagaaaaatagtgtttccaaagcgctaagtcaaaataaaggttaaactctgtgagatgaaaccacacattgcaaaagatttttacagatagcttgttctagtttttatcatggcatatgtggtttttcactataggcctcaatgagctccaaaatgtcccttcttttattctacaaaaagaatgtttccaacctgcccaatcaaaacaaggtttaactctgtgagatgattctacacattgcaaaacattttctcacataccttgtttctagtttttatcctgggatatttggtttttagtataggcctctatgggctccaaaatatcccttcatagatattacaaaaagagtattttcaaccttctgaaccaaaacaagggtttaactttgcgagatgaatccacatatctcaaagcattttcacagataatttgttgtcagtttttatcagggatattcatttctttataataggcctcaaggactcagaaatttcttattttaaattctactaaaagagtgtttccaacctgctgtatataaacataggtataactctatgagataaatccacacatcacaaacattttcacagatagcttgtttctagcttttatcacaagatattcagttttcactataggcctctgtgggctctgaaatgttcctttgtagattccacaaaaaagtgtttgaaacctgcagaataaaaacaaaagtctaactctgtgagatgaatccacacatcacagagcattttcactaataatttcttgctagtttctatggtgggatatttagtttctcaatatactcatccatgggcttcaaaatatcccttcattgattcttaaaaaagagtgtttccaaactgctaagtcaaaacaaatgtttaactctgagggataacccacgcatcacaaagcattttcacagatagtcactggaacgctggcctttctggaaaagccacctttttggtacccctcccctcatggccgtggcagtggcacagtgctgtatcctgcctgggctttggcctctgctttgtcctgcctcttgctctgtctcccctgtttctgaggggcctagatgcctctcgctctcgctgaatgtcttcaacaatgatcacaacccagtccgtcaggtagacacttactggagatccctgtcgtgatcgtttatctctttcaacctgtttctgcttgatggggcaggatagacgaccctggagctcttggcttccatacttctctcagacagggaagcttccttcctctccgtgtttcacctcatgggtgggtggattgcctggaatgagcgctagtcgaccgtgacagaccttgtcttctaggacaggtggtgtcgcatttcctctgcacttcatgtctcattcgtgagagacatcctctcctctgctcctgggtggactgagtctctggatcttttgaccataacgaatgtcggggaaaggaaccaaagggactgggctggggctggggctgggtctgcggctggttgcaggggaggttgggtcagggctacctgggccatggagggttgggggtggggtgaattttgccaaaacctctttaatcctctggcaggcatttcaaaatgtggcttggactaaggcacaggcaccctcctcgttcccaggtgttctttgattttccttggcattgatggaaaggtcactcattccccccttcgaccgggcacattcctggacaccattgttggtttcgccatcacaatgtatgcctccggtgacacacattcacaccatctgctgtgggatacaccagtgccacgcgtggtcacatggtctccatctcggattcacccctgatcctctttctaccagtcccataaagcgcggtcggctttccggagccccagggcttttagaagcggggcaggccactgctctttcaaaggaggaaggaagcagagggctgatggatcagtgaaagtgcagctgacactaggccttgagacttatgggattattctgtgctgcagcgaggccctacggcctcaccagatgtagtgagcccatcctatctcattcagcaggccaaaatggatctgaaggggagtcctgagaacacagcaagcctcctgaagctcccgctccatcggtggaagtcggctcaaggaggtcctgaggacaggactcctggggcttttgccctgggacaatatacccggggcccctctcccacgctgcctcaaattggaccccggatgcagccgactccgcggctgcagcaggagcctcgctgccaccccgcagcgctgccattatttaaaggggacgcagcctgactgccaggagcggagcgcgagtccgcccagccaatgctcctgggcgaggcgcgagtggcttttcccatcacagtggttccacggttgtcttagaaaccagtccccgaggcttagaaaagcaggagccctccgcggcagtccatgggtgtcagggttctgaggctccggcctgacctctccacggggtcgacgggaacgtctccagatgccaggagtcgcaaagcgccaaacaggatgaggaaaccccaggcggagtccgggaaaagcagcacagcatcccagcctcaggcctgcccggaccgtgttggttgggttgactctccccaaaagtcgtgccgccatccgtgatctctaagacaggtcggcctgcgtgcccctgggctgctctctcatccgagggtcgttctcgtcgagagtagaatcccgcagtctcaggggttacctgggggtgtgtatttcaatacttctgctggatgactctgtgtgtgagtctgtgtgtgtatgtgtgtgtgtgagcctgtgtgtgtctgtgtgtgtgtctcccattctctcttctctctctgtctctcagtctctgtgtgtttctttcccactctctgtgggtttgtgtgtgtgtgcccttgtgcgtgtgtgtctttggctgaatgtgccctgtgcaccacacagcggtttctcgcatggcggcctgtctttgttgagcctctttctgcgtctctgcctgggtcatgaggccggttgtcaatcattttcgcccccgcagatctgctttgggtgggtgaaagcctggcccacgtgaggagatgcttcggtcccggagcaattgaagtctcatccccatcctgagtggcctcttttctaggatcaagatgaacccactgcagacgaggacaagagccccaacaggagctctttgtcccacaggagagcagcggacccacgtcagagaagatgcttgtgtcttttcatggctcttctctgagaaatgaagccacaccacgatacagtcagcaagaggaagccaggaatgagagatggcaacaatccctgtccctggaacgctggcctccctgcacaagccaccctttaggaaccccaccccttatgcctgtgacggtggcaaggtgctgtatcctgcctgggctccggcctctgctctgtcctccctcttgctctgcctcccctgtttctcaggggcctggatgcctctcgctctggccaaatgccttcaacaaagatgacttcccactccgtcagggagacacttcctggagacccgtgtcgtgattgtttctctttcaaaaagtatttccgcttgattgggtaggtctaatgacccgggagctcttggcttccataggtgtctcaggcagggaagcttccttcttctccacatttcccctcatgggtgggtggattgcctagaatgagctctaggcgaccgtgactggccttgtcttccacgacaggtggtgtcgcatttcctctgcacttcctgtctcattcttgagggacatcctctcctctgctcctgggtggactgactcccttgatcttctggccaaaacgaatgtcagggaaccaaagggactgggctagggctgggggctgggactggggctggggctgggtgcagccgatgttgcgtcagggctaccgggttggtggaggattggggttgttgcgaattttgcagaaacctctttgctcctccggtaggcatttgaaaacgtggcttggctcaggcacaggcagcaccccgacccacggggtcacaggtgttctttgattttccttggcattgatggaaaggtcacctgtttcccccttccacctgcacatgcctggacagcaccctttgtttcgccatcgccctgtatgcctccggtgacacacattaacaccaactgctgtgggataggccagtgccacgcgtggtcacatggtctccacctaggattcgcctctgttcctctttgcagttgacctgtaaagcgcggtcggctttccggatccccagggcttttagaagcggggcaggccactgctctttcaaaggaggagggaggcagagggctgatggatcagtgaatttgcagctgacaccaggccttgagacctacgggatcattctgtgctacagcgaggccctgtctgcctcaccagatgtggtgagcccatcctatctcactgggagggggccaaaatcggatctcaacgggagtccggagaacacagcaggcgtcctgaagctccccctccctcagtggaagtcggctcaaggaggtcctgaggacaggactcctgggggtttgggcctgggacaggacgagacacccgcggccccctctcccacgccaccccaaacaggacccaggatccagccgccgccgcggcggcagcaggagcatcgcggccgccgcgcggcagtggcgatatttaaaggggacgcagcctatctctcaggagtggagcgcaaatcgtctcacccaatgcgcatgcgcgaggcgcgagcggcttctcccgtcacagtggttcccacggttgtcttagaaaccagtctccgaggcttggcgaagcaggagccctccctggcgtgcttgggtttcggggatctgaggctccggcctaacaacttcacggggtcgacgggaatgtctccagatgccaggagtcgcaaagggccgaccaccatgaggaaagcccagcggagacgggggaagcagcacaggaacccagcctcaggcctgcccggatggtgttggttggggtgagtctccccagaattcgtgcctcggtccgtgatctctaggacagttcggcctgcatgcccctgggctgctctctcgcccgagggtcgttctcatcgagagcagaaccccatagcctcagggattgcctggaggtgtgtttttcaatgccctcctcctttgaaagagcagtggcctgccccacttctaaaagccctggggctccggtaagccgacagggctttacaggacacctgcaaagaggaacaggagcaaacccgaggcagagaccatgtgactacgcgtggccctggcctatcccacagcagttggtgttaacgtgtgtcaccggaggcatacggggcgacggcgaaacaaagggtgttgtccaggcgtgtgccggtggaaggggaaaacaggtgacatttccatcaatgccaaggaaaatcgaaaacacctgggacccgaggggtgtggggggggcctgtgactgacccaagccacgttttcgaatgcctaccggaggagcaaagaggtttctgcaaaattcgccccaaccccaaccctccaaggccctggcagccctgacgcaacttcggctgcacagagccccagccccagcccccagccctagaccagtccctttgtttcccttacattcgtttcggccagaagatcaaggggttcagtccacccaggagcagaggagaggatgtccctcaagaatgagacaggaagtgcagaggaaatgcgacaccacctgtcgtggaagacaaggccagtcacggtcgcctagcgctcattctaggtaatccacccacccatgaggggaaacgtggagaagacacctgcctgagacacctatggaagccaagtgttcccgggccatgagacctgcccaatcaagcagaaacacatttggagagacaaacaatcacgacacgggtctccaggaagtgtctccctgacggagtgggaagtcatcttagttgaaggcatttggccagagcgagaggcatccaggtccctgagaaacaggggaggcagagcaagagggaggacagagcagaggccggagcccaggcaggatacagcaccttgccaccgtcacaggcataaggggtggggttcctaaagggtggcttgtgcagggaggccagcgttccagggacagggattgttgccatctctcattcctggcttcctcttgctgactgtatcgtggtgtggcttcatttctcagagaagagccgcgaaaagactcaaacatcttctctgacgtgggtccgctgatctcctgtgggacaaagagctcctgtggggctcttgtcctcatctgcagtgtgttcctcttgatgctagaaaagaggacgctcaggatggggacgagacagcaattgctccaagaccgacgcatcttctcacgtgggccaggctttcacgcagccaaagcagatccgcgggggcgaaaacgattgacaaccggcctcatgacccaggcagagacacagaaagaggttcaacaaagacaggccgccatgcaagagacagctctgtggttcacagggcatattcagccaaagacacacaagcacacgggcacacacacacaaacccacagagagtgggaaagaaacacacagagactgagagacagagagagaagggagaatgggagacacacacacacacaaacaaagggtcatacagcagaggcattgaaacacacaccaccaggcaacccctgaggctgcggggttctgctgtcaaccagaacgaccctcgggtgaaagagcagcccaggggcacgcaggccaaccggtcctcgagatcacggacggcggcacgacatttggggagactcactccaaccaacaccgtccgggcaggcctgaggctgggagcccctgctgcttcccccgtctccgcctgggggagcccaccacctacccaccctccattcacctcccctccttaaggctcactaagctctatttaccttttgtaactccatccctccgtaagtacacaactctcctagctggtttcctagagggcagatacagtgtttccagttggccctctgcagatatctatgaacaagtctctcccagcccctacatataaatatgtgtgttctagacagacgggcctaagtcccaatgtaaacacatcacaagataattacaccttatatgcatacagatctctctatagagttatatttgaaagtgtctataactctagagagagattgcagcatgcacatataggactgtaattacttatatgtatttttataactatgtagttataaatagatatgcctatatatagtgataataatatagcaatatctccatagccatatatggctctaaatgaatgctctaactactctatttcacaatcaataagtatatatcttctgatacataattctaacaatatacgtttttatctatatagctgttcagagatataaatctgtcaggatatcaaatgtacataaagctggatggctgtaagagagtcgtatattttcccatatataaatctgctcctataactactgtatatgcacaaatacaatggaaatagttatatttccctcaaacataaatctgtaaatacaaccacagcacatttaggtacggttagacatagagcaatatttcctagatatcagtctgtcaatagagccacagtgtctccaaacagagagttatagagggagttataaataaactctccagatgtgaacggatcagtagaactagatgtaaacatgactccaagccgttctttcttcttcttcttctttgtaagatattcctgaagcaagcccagtcatataacagggtgcaaaggtgtctgggtactggtatttttccccccaaggagggtcggaagtcgctggactttgggaaactgagcaggagtgggtaggggacagtgcccgctcccaacgcaatccagaagccccttccgtctgtctcctggtggctgagagctcgggcaagtggagaggcctaagggagaaaaatgaaaaagcagagtctggcttgagtcgtttggcccttctgcctaaaaccctctcaacagggaagccccgaccaggcgtcggagcggagagagcccacgaggcacagaggttgggagaaagggtctgcaggccgggcttcggaggcctagcggagtcgccagccggtgcctgaccgcccggcgccccatcgcccagggccgctgcctcgccgcaggcctgaacacaaaacctgggccctagccctgcgccctgtgctcagcacttccactggtcttattttattgctgtttgtccaattaggtatcgcagcgtcctccaccaggtgttgttttcaaatgtgagggcacccagagctttctgaatgcgtgtctgtgtgtgtgtgtgtgtgtgtgtgtgtgtgtgtgtgtgtgtgtgtgtgtgctggctttaaataagtgactcagtggatagtgtatttctcttttcagaccaaatgtgtcactggctactggaaaagaatccagacctctgaaagggttcgtgacaaattttttagaagttctcacgctcatttgttacgatgattttcttttcttttttctcttttaaaaaagttggctaatttgtgcttctatattcctctttaattttatttttattgggggtacaaatgtttttaaaggagggattttgttagacccgaaactgtggggtggcttcctctctagcaaacttattatctctacgcctgtgattcccatcaccgccaagaaaacaaactaattaaacgaccagaaaactgtacctggagaaaatgaggtagaagttgcaggatccgggaccgcggtctttgcttgcttcatgaaaaatcggctagtctccaaactcgcgaaggaatattcaaggtgcctcaactcctccttttaaattttttaataaagagcctagacagggaactttccctgggcctgccagagccccagcctcgctctcccaacttcccagcggccataagtgtttttctgcttccgttcgggccccccgtcttcccgggcatctctgagctcctgccggatcaaggctgtggtcatcacctcattcatctctgccgcttggcctgagcctgcacatttggcctcattcttaaaacagaggctcctggagagtcccaaaagccactaaccattcccatatgtgggatcccttctctgatcacacaaagcagaagcctgagaaaaaaagcaataaagagtggtctctggctctccttcccctcttccgtcccttgtctgggaaaggggttcccaaccccagccccaccaagagcatattaagatttcttcctcccttcctttcctatctccccctcagatgctgtgatcctgactccttctgtctccacctcaaaatatttcctcttgcattttattgttattctgttatggagggactgttaactactgttttattattattattcattatttattgttattatgattgttgttagagatttgttcaccactgttcaggggacagcagcctggcccagggggaagcctgcctctccctctctgtctctctctctttctcacacgcacatacacacacacacaccctaacacagtgcacactcatgcatatatgctcacaaatgcctgctgtgttcaggcccctgcacagcaatccgaagaggcaggcatcctaccgcagcactcaaacaacacactgcccacgcacaccagcattcaggcagaacaccacccccagaccaacgccaaaacccacacgcaccgagcttgcaaggaaaggaaaatacataaagaatcccttctctccacaacctggaggggcgagtcaggcctctgtctcttccccccagtcgctttcgctttctctttttttttttctccttgtttacagcttcagagagctcaaggcacataaatcttgagggttctacagagcgcagagcacatttgtatgcatcgttaggactcgctaatacctaagcccattaaggagcgtgtatgcgcgtggtttccggtgtgtattaacttatagttaaattctggaggaaagggcattgtgaattaacatataccaaatccatcatgggcttttgtcatatcagattagtcagtcatgggtttgggggagcaacttgcctgggttggtgtgtacccacccttcaaactttgtggagcaggcccaggggtcttgggaaacacgaaggcattcctatccagccccagtcattcggatcccccaggcctagcggccgcacacctgcgagatggcggagggactgcagacccgggtgcgggaggccagcgccggcgaagagaggcgggggagggaggcccctccagcgtcctgctggggttgagttggggcggctcgtcccatggccgctgggtcgtctggtttccgctttccgaaagaaatgagaggagaggcaagtggagacgctgaactttaatttaaccatagagaagacagtggggggagggggaaaaaagatcggagaaggaggaggaggcggccgagagatcgaggaaaggaagtcctggcggctcgggggaacttggagatctctccaaggggctgaaagctggaagttgtatgaagatgttcctttcccacatcccagctactccgccccagtcgaagagactaattccggccctcttataaaaataagaaagaaaaggtaaagaaaaagaaaatctaattatgtggcatgtttcagccaggtgttcctggttccaatgactcagaccctattggagccccggggatctggataattgggcatgcatagacagtgatgaaggatgccatttctaaaaggaggaaggggagaggaaagtccatctcttggggtcttgtagaaaatgccaaagaccaaacaagctaaattattgtgtccgtgtagatctatttccctatttacatacagcaggctgtgggggtgggggatgagggaagtccaggaataaacgaccaggctggagctggctggcaggagagaaaatgcgccccctggccctttgcaggaacagccaaggggcctcctcagctcgcagctcaggcggccttgcggcggactggtccggggccgggggcggggccggcctgggggaggggaggcgggggcgggaggggaggcggaggcgactctccccgggcgctatgaactttagctgggccgccgcctgtcagccccagaaagcgttaaaggtgcagcagcccgcgccagcctcctcagccgcctttgtatgcgtgatttatgacttcaatcttggttcaccaagagttcacacggctttcgctgctgttgaaggttaaaagatggtcttcccttgacaagtgggactattgaaaattccttcttcttctttttttttttttttgccaaaaaaattattcactgtttatctgaaattcacatttgactgagggtcctatgtttgacctgacaactctactctttttgtttgtttgtttgtttttgttttttgtttgtttattttattgatcattcttgggtgtttctcgcagagggggatttggcagggtcataggacaatagtggagggaaggtcagcagataaacaagtgaacaaaggtctctggttttcctaggcagaggaccctgcggccttccgcagtgtttgtgtccctgggtacttgagattaaggagtggtgatgactcttaacgagcatgttgccttcaagcatccgtttaacaaagcacatcttgcaccacccttaatccatttaaccctgagtggacacagcacatgtttcagagagcacaaggttgggggtaaggtcatagatcaacaggatcccaaggcagaagaatttttcttagtacagaacaaaatgaaaagtttcccatgtctacttctttctacacagacacagcaaccatccgatttctcaatcttttccccacctttcccccttttctattccacaaaactgccattgtcatcatggcccgttctcaatgagcttctgggtacacttcccagacggggtggtggccgggcagaggggctcctcacttcccagtaggggcggccgggcagaggcgcccctcacctcccagatggggcggctggccgggcgggggctgaccccccccacctccctcccggaccaggctggccgggcggtggccgacccccacctccctcccggatggggcggctggccgggcgggggctgaccccccacctccctcccggaccgggcggctggccgggcggtggccgacccccacctccctcccggatggggtggctggcctggcgggggctgacccccacctccctcccggacggggtgccgggcggagacgctcctcacgtcccagacagggcggctgccgggcggaggggctcctcacttctcagatggggcagctgccgggcggagggtctcctcacttctcagacagggcggccaggcagagatgctcctcacctcccagatggggtcgcggccgggcagaggcgctcctcacatcccagacggggcagcggggcagaggcgctccccatatctcagacgatgggcggccgggcagagacactcctcacttcctagatgggatggtggccgggaagaggcgctcctcacttcctagatgggatgacggccgagcagagatgctcctcactttccagactgggcagccaggcagagggactcctcacatcccagacgatgggcggccaggcagagacgctcctcacttcccagacggggtggcggccaggcagaggctgcaatcttggcactttgggaggccaaggcaggcggctgggaggtggaggttgtagcgagccgagatcacgccactgcactccagcctgggcaccattgagcactgagtgaaccagactccgtctgcaatcccggcacctcgggaggccaaggctggcggatcactcgcggttaggagctggagaccagcctggccaacacagcgaaacaccgtctccaccaaaaaaatacgaaaaccagtcaggcatggcagcgctcgcctgcaatcgcaggcactcggcaggctgaggcaggagaatcaggcagggaggttgcagtgagccgagatggcagcagtatagtccagctttggctcggcatcagagggagactgtggaaagagagggagagggagaccgtggggagagggagagggagggggagggggagagggagggggagggggagagggagagggagccttctttttttttattttagaagcgaagagcagaggctcaggtgaggaaaaaattggggggtgggtgtgcgggggacaggggttgcaggtgggccaaaatggtaggtcaggaaggtttgtcttcctatatttaggattttttgttgctaggatttgcgtgcatgttggagagaggttagagaataagagggagataggcaagagatgtaaagatctctcatatttagaggccaaaggagtgaaaaaaaaatcgtgcttccacagttaattatctgggtaacttgggtcacaccccctaactgatcctcctctagagaccagaaatgggccaggtaaggggcagagttgggcaaagggtaaggtttgtgtgcttctcactgggtgtacttgatcatccaccttacctgggtaactacttttttttttttttttttttttttttggaaatgtggtccagctctgtttcccaggctggactgttgtggcaccatcatagtttactgaagcctcaaactcctgggctcaagtagtcctcccaccttagcctcttaagtatgtgagactgcaggcatgtgccacaccgccaggctgggtagctgcttttcaatatgcttctgcacccacagatttggaaaagggcatttttagacagcagtctttcaactctcttcatcctgtaggtttagcctgccatttacatttgatgcacatgaaaaggctaatgggaaggaaatctatagaattgtaattggaagacctttcaaatcccaaattcccttggtctaagagccagtctctcttctttctagcattttgacaaaggtcgtgccacagcagaggtggtggtcaaagatctcctaaagaccaggatctaaggcccctttgtgatctaaggctctgagtacttggagagacaaaactcactccttctttgtagattcagagagacagagagagagagagagagagagagcgaacgagagagagagagaatgaggagataccttgaagctgagggtctgcttggctcttcgaggtttcttttaagatatgtttttaaaaaaatttctggagtgggaattgggattgtgtgcactgggaaggggaacagcagagagctgggtcgggagttgggtgtgcctccctagccctatttaggccccatctccattatcaatactaggtaaatgtcttaagagatagagccagcccctcaaatccagatctgggaaccaaaggcatccacgctagaaggggcactccctgcttctctttctacatagcgttagagaggtattttcccaccatgtgaggacttagataagagaaggagaagagccagaaagatgtccacatctcgccgggacacctagcaccaggccctcctacaggggacctcgtatgtaaatagcagaatggggagcagagaacagagagacgccagaaatccagagtccaggctctgaggtcactttggtaggaatggtcctctggccttatgaagaacagaggggcaatatggcactgtttagaagctcagggggtggtagctgttaggaggaatcagccaaggaagctaatgaatctcttccgggttctggttgggaagcagaggaatgaacttaacggcctctggaagtaatgtctgtactgaagtccccttcttaccctttctgactgtgttcctccctgggaaataattccagtaggcttgtgcttatctgcaagtctggggtaattatgaattattaattcatcattaagacttgattgtgaccgttgctctccagtggacccatttatctccttctttgtgaggcagaggggagcctctgttagcccttggcttctgtaacaggcaaactgaggccagcccctcttgaaggcagtccttgaactctgccctaggtgggatggttgcctcattaccagtcaagtaatgttgcacctcagagtatttgtgcaatacagccacttcccacaaacttcggatttcaaagtgctttgtaggctcctggagagatagagtagcggattgggagtgagactccaacaggggaagaaacttggccaagctgtgtgtggagacaggaattaaggtgaggtgggaggactcccaggcacagtatctaagcaatctgggatcaggaatggtcattttgtcttccttaccctaaggagatgctagtttccctcaactctctggggacccctgaacacacatctggacccttttcctgatctctctttcccccaccagcctctcaatcgagaagcacaggtttcaagtcatatcatcccctctgatggttaggggtgggaaagtcagatctgccggttgtttcacatctgtgagaggcctggagagggagaaaattgctcctatcccatgaggtaatgcccatctaaatccctgctgtaaactcacctcccccagcactgaaacaattctcttcatcctttttttcccctcttcttccctctggaaccacagacagggagactgagggtaggagatgcagctcccaacagctgtacctagaggaagagacagcagtaggaaatgaggggagagtggcttaaacctgttatttcccacaaggtttatctccattcttcaaacccaggtcaacaccctaaaaccagagccatgggaagccctctctccttgttcccccaactctctctctctcacagaaaaggagccctgtgtccctccctgaggccaaggggcttctctaaaaactgctctaagaacactaccactttctacaggacacctgaagtcccaacccccatgtatctctcagtgcctgtctggtccagagggagccagtggctcttgccaacacattaccattttgtgccccacgatgggggtggtccatggagtcatctcagctttcagcccagacctcactcactctttctccaagccatgccaacattccttggtctctccaaagccaggaggcaggtaggaagcccatccagagggtcccctggaactggctaatatagtttaatttactgtttggtggtaaatcaagagaacttgggaaaaaagggaaggagcaactgtgcctagcatctttctcagccacccctcccctggacattggctttctccatgaaacagtgcactgttgttcttggacaaccattccccaccatcttcgttggaagggcttgagtttcaccctccgttcacccccattaatcaccccagcagctaaacatcacccagccccctctggccctttctcttcttgcccttagtattcatggcggagcattcctcactgctgcacgctcacaaagacccctcctctgacacgaggtccctcccactccccaaccacccagtccacgatgggcactgctcactgttctggatgttccaactgccggcgcccactcctggaccccgttcccccactccccagctatctccatagcgactgcccccttcccatgcacttgttggcttaccacaccctccttcaggtaactcctcttaaccccacaaaccctcttcagtctttcccagccaccattctgccctccatgccctatgcatgtgtagcccttgtctgcttctctatacttctccttgcttctctcgtctttccttccccaagacattccgtaggcacttcatatggtggacctgaagcccttcccttctgaccttgagaaagtgagaggcagtgtaccacaggggttaaaagcatgggtttgtgattcaagtccctgatctgacacttgctagttgtacaaacttgggcaaattacttaacctctctgagccatccataaaatagacatacccactgaccttatagagttgttctgtagatcagattaaattttatttgcatagatccaagcattcagcaggggctcgataagtggtagttattgtgttacaagcttcttgtgaagaaagagagatgttcttcaggttctaaaaagtgaaggaattgcctcatccagcaccagagagggagggataaaaattacacagtcttgcagataagcagggcccatttaccaggcagtgatactcttctattagctctagagggtctcaactttcgctgcacattggaacccccagcgagtttttttgtttgttcatttttgtttttgagatggtgtcttgctcttgtcgcccaggctagagtgcggtggcacatctcggctcactacaacctctgcctcctgggttcaagcaattatccctgcctcagcctcccgagtagctgggattacaggtgcttgccaccatgcccagctaatttttgtatttttaatagagacggggtttcaccatgtttgccaggctggtctcgaactcctcacctcaggtaatctgcccaccttggcctcccaacgtgctgggattacaggtgtgagccaccatgcccggccacaagctttttaaaatactgatgcctgggtcccacctccagagattccaatttggttggcctgtagtagggcctgggcatctggatttttaaaactccccaggttgataatgtgtagccagaggttgagttgcaggccctaggaaatgatacaagagataaggggagggctgacacttctgccagagcaagggaggggagggatactcagctgagagctgcttctcaaccttggacatcccctcaccagtggcactgcttcagtcggggaggttttcacttagaattagcttctcttgagatcccagaatttcagagactctcacctttttcatttcctatagctattagaatttacaaaggggccacccaaagaggagacagaggaattgacaaattgacctctaagaggctcatctcttatcagaaaagcatatggtccccagaccaccagtgatagaagcagaggcagatacctccagtagtgggaaaatttgtaattacatagtaaatggagtttctacctggttgctacaataataggccaagcaattaggatacaagtttccaggaccttttcctatatttccaaaaagataaatcacccctaggaacagaatctgcatattgtaattacctgataaatatttcatgcctggttcaaactttctcctcttctatttaatggccacaaacttgagcccagaggaaacaggagtgaggagagtgggggttggctgtaggggggaggttctaccttggcttcagggagggagaaactgtcttagttaattatttactgtcctcctgttcttttaagaaaacattgctcacctggagaaaatcatgtcccaggtggtaaagggtgtgacttgggcttgttggcctcagccctgacctcccccaggagaggccaggttttggtgaccctgggggtgctgggaactgcaggctttggagtcaagggcccagtgtttgaacaagagctctgttctgtcacttattaactggatggctttaggtaatttacctaatctatgtgaaactcagtttcttcatctgtaaaacagacataatttttaccttgtagggtggccaatgctcagttggatctcaatgcatgataactattattatcaacagtaacaatgaataattaatagcccattggattgtaccctttcccttcctcaaccttgctccagtgtgtagggcacctaaactactgaatgcttactgcgagtatggtgaatgccttagctcaattacacaacataattctttgaagggaatatcttatcatccctacttatctgtgttttgcaaatgagggaacagggcatgtagaagttaaataccctgccaggtgtcacacaactaagtggttaagagcacaggctctgcagtctgactgtgtagtttcaaatttgggctctgccacttaataatagactctccttgacttacgatgaggctgtgtcccgataaagctgtagtaagttgaaaatattgtaaggtggatatgcatttcatacacctaacccaccaaacatcatagttcagcctcgcttaccttaaagtgttcaggacactttcatcagcctacagttgggcaagatcatctagcacaaagcctattttataataaagtgttgaatatctcatgtattcaacatgagatatttattcatctcatgtattcaacatgagattcaacatgttataatatactgtactgaaagtgaaaaacagagtggttgtatgagtattagaagtacagtatctaatgaatgcatatcacttccacatcatcataaagctgagaaattgtaagtcaaagcatcataagtcaaggaccgtctgtaatcactgcaggatggaacataaactgcttaacctcgctaagcctcagtttcttcatctgtaaattggggatatgaatggtacctacctgaaaggtagttgtgagaattaagtgagaaatgcgtgtatagtgcctgtctcagtactggcatgtggtaagtgcctagtaaatgtgagttgtcagtaccatcatcatactacccagcaactcagggccatggcgtctcctgctctttggtggtgtttgggagatgagtgagtgtgagggtcctccaaaggtcacagagctgctcttttaactccccctgacagacacacacacttcagtatctaggactcgggaaaaaggacactaagcagattatgactccatttcgggaattaaatcaaaactcaagactatctcaatttggcttctgacgagagggaaaggttaaaagggagtgaggaggcggttgagtgtgcgtccagaattgcaattggttctggatcccacctcccagctcctccacagggccaggcccaaggagtatcccccccgggggtggaggagtgaaggagccttagaacctgtgttatctgaatgtgggtgaggtggggagaacatggtcaaggagttgggaaattatccagaaacattttccaaagggagatcttcccgcataccacctcagcctggctctggattgcaggggaaccccagaacggatggggtctgggggcttaagacaggtaggtggcctcagtagaggggagaaaaagtcctgctggagacagtcgcctccctggagaaggacctgggctagtgttctctttaaagacgtctaagcagtcctggtatgctaaaaacattatgtgtatgtgtataaacatatattctgtgtgtgagtagccactcagctcttacttggcttcgcacatttggcccagattattctgagcattgtaaactaaaagtgaaattcggtttctacttaagagagagcgtgattttccccagtattatctcctgtgcccccaacactccaccaggctttaaaggccattatacagaagggagaactgagactcaggagattgatggtttgttcagaatcgcagaagcagcgtggatccaagaagggatctgctcccaaacagaaaccagtgtcttgggagagagagagcagaggaagcccgcacctctgccctaacctgaggctttgagcctcccgcaaagccgagtgagttgagagcgcctggaaggcagacgctgcggagggagggactcccgggctcgccaaacagcggggcctcgggcaagagcgtcgctggcgcgtcctcattctgcgattgctgtcaggggaccatccatcagcgccgccctggacgctgggccagactgcccgccgcccgccccgcccgggtctctccagatcgcattagcgtggggcgagggctcagtgcggcaccggctgctgagggagaggcgtggcggggaggagggtggtgcggggggacgaggacatcgctgtggggacactgcaggggcaggggagaggctgctttaggaccctcctccttttcttccaatctcccgcctctgggatctaaggtggatgaaaggggcactagaatgggagacttttggggggcagggggcgcagaacactgaaggcatcagggaagagtagtgatgggggcagttaccagaagcagagaggaagaaatacctgtaaaggggaaagccagataaattgtctggggaggggagagactgaaaatgggggtgcagagattgggggttagtggaagaaaaagacttaaagggaaaggaaaagagaagctgtagagggaaagagaattggcaaggaattgacgagagagcagggaaacaggaaaccacagatcgtcaggggccgacaaaaccttagagacaatctactgcagcccctcattctacaaatgaacaaatggaggcccagagaggggaatcccttctccaaagacccactccacctgctggctgggcaggctcttgaccacaggctcattcattcaacccatgtgttttgagcatctgctgtgtgctgggcactggactgcctggatgatgcaggatcagctcctgccctccagaagctacagtctttcctcaggggcttggagaggctgagcatccaggaagctccctcacccccagccaggagggactccctgagccccacctctcctggccactgaaccttcctttccctctgctgttctgcttatctcctcatggaggatggccgttccctggaagatcttccctctccactttcctggggactccccaggtgtggagacaggtacttgacagtttggccaacttgttctatctcccacagccaacagggtaggcctaaaagcaaagtccatattccttgctggggttctcctctgggcatggacaaatcccacaggttgcactgagatccaatcgagctgtggtaaggaggattgaggctggacatgaagaagtacttccaggtcccacagtctgggaccattttcttgctggggctttaaagtagctgtccttctgtgagcacagtgttgtcaccatcttccagggaaggacttgtcttcctcagtctccagttagccttgtgcgaggcattatgctgggaatgttggggttccagatacctggtctctgaccatggggtttctgctctagacatgggtgaactgacatctccctggcatcctcccagtcactgccagctctgcaacatcatggaacccctgagtccttcacaactcccagatcatctcatccttcctccttgctctgggaagaccatgtctgagtagttccaaccaacctctcaccttaaacccagtccctgacaaccagaagtgcctccttagtctggacttgaccttccttgctgtcatggtccatcagcaatgaccagggctgaagcagcacgttttttctacaaacacccctccctcccagtgatgctcacccaatccccggtggtcaggcagggagtggggacagcttcctgccaagagctctggaaggcagctctgcctcctctgcctgaagcaagctcctgtatactctgagatggtggtgttcattttaaagaagggaccatctttcctccacagtccagcttacatttggagggagacaaatgtgagtttccaatcccagaatctttgccactgtaccaatctccatggatgcatgggattcaggaaaggagagaaatgagcagagcgaggacacgaatagaatccgtttcctaccccttgttccagcccaactcccagggaaaggccaacagagggcaagagaggtggacactgaaaattccagactaaagaccaacagacagatttcagcattattccttcttgtaggcaaagtggtgcctaaggatctaaccaaatgaaaaagcctgggaaataggctatttctgcaccccctgaccattcatgcagagcaggatatcggcttcagcccagaagcaatgctagaagttgagaggtttggagtagactgtgaagcagttcctccaagtgcatgccagatgagggggttggagcacccagcccagaacagcatccaaggaaggaggccttggcgtaactctctgtgtctctgtgttaacttcacatacattgtcttgtgtgatccttactgccaggttcagcaccaggcacagaatacatgcttgctgtacaaatgcataagtgaagagccatgggaggaaggtcaggatcctcaattttagatgaagaaacagacacacagaaaagttaaatgacttgctcaaggtcacatatctcatcagagacagggccaagtttcagtggagagccactttagtggtagagggtggtagggaggagggaggcaggaagggagagaatgaaccatcagacaccacaccagggggagaggagagctgtcatctctttctctttgtgaaaatatattacttcctggaaaagatggcatttaagaccacacagttttaaaaataacccattgaaggttgatttgtagcatatgcaaagttctgccaaaaacatggagaggtcaatgagtagatggggtcattgaggatcagaaaagaaagacaacactgaaagtctggacagctaagccccagaattttgctagtcttaaatgctgggtgacatcaggccagccacacccctctctgagcctctagagaatggagatgccagatgtggaggagggtacacatgggcaagaggaggcaggtcattgccttcagggtagcaattggaggcatcaagttcccacttccctagacctattctttgttgttattattgttgttgctttcctctgattttaatagttttatgttttttgaataggaaatacatgtacatggttcaaaacacaaaaggcaccaaaagttatacagtgacaagtaagtctccccggaacctcagaactcccaggccacccatgtcctcactccattataactgcagtaaccactgaattgtataacctccaaaggtattttctgcttctcctggcttgtaccctgaggccatcacaaaactgagttgagcactgatattctgaggagaggtggtacacatgttttggcccctggactggtggggccttggaatactacatactctcagtttccactctgaaaagatgcagaaacttgaggtcaggagagaggacatttctgcatgcttagaagctcagaagcctcacaggtgagaggatggagttgggagccaggcagaggcaggaagcctctcaggggctctaataccacactcccaccccagagcctcacagtgccctctgggttagcctggctcaggtatgcacccagttaggtcctgctcaagttttccagagaacaaggcccagtgcttcccctccaccacctgtcacattattgggaggccttccttgatgtctcattctagttccttcaactttaggtgcagcccatggcttttgattctgccgtcagtggagatggaacatgctcttggagatgatagcttccagggacccaggctcttcctcccacttgcatacacaattttccttcaggccctctaattccacctcaatcttttttccagacttagaagacacatgcctgttctttcagctaccctcccccacctgaattcccagtgtgcctccattcccaaccacctcattcttgccctgcacatccctttggcattattatccccaagtatgctttggtcatgaagatggtaaaatcccaacctaaagccaagtcctccaccagattcgggaggtaaatccagcctagtctctttgttaactgaatctctccattttaggtgatggcctagcccaactcatgaacttgtgtccaacactctgactctcagatcctcacacatggcctgttgtgagataaggcacaagttcaccccaagcctgggatggcctcccctctggtctcttctccaaaccctcccctggtgaacctcatcctttgcatttacacactaagcaattaatattgagcactattctaagttcttagaatacattggtgatcaaaaccgagaaagaccccccgcctgtgtggagtttacattctagcagagagagacagataatgaacaatattcttactaaataagtaaattatatcatatattagaaaatgataattgttacagaaaaggaatagatcacgtacagaaagatcagcatggaggggaaatctgaggtttttaatatggttgtcaaggagatctcactgagaatatggtatttgaacaaagacttagaggtgagagaggaagtaaaccccatagacatcttggcaagagtattccaagtagagggagtggctggtgctaaggccctgaggcaggaacatgcctggcaagtctgtgggagtgagcaagagtgggggcagatggcatcagagaggtaaggagggaacagatgatgtttggcctcgtaagtcaacttaaggactttgctttttactcggagtgaagtagagaggaaagacatgattggacttcagggtcttgctttgttttgagagacagtctcaccctgtcacccaagctagagtgcagtgccacaatcttgactcactacaacttctgccacccaggttcaagtgattcttatgcctcagcctcccaagtagctgggattacaggcacctgccaccatgcccagctaatttttgtagttttagtagagacggggtttcaccatcttggccaggctggtcttgagctcctgacctcatgatccacccaccttggcctcccaaagtgctgggattacagtcgtgagccactgcacctggcctggacttcagtttttaaatagtctttttgtgttttgtgttgagaatagatcacagggggccaagggaagatgcagggagacttgttgaaaggtcattgcactaatccaagtgagaaatgtgtggcttggaccaggatggcagcagtgcatgtggtgagaaaggcccaaattctggatttggtggcagtttcctcttccttggcttccatccttttgctctctttgcttcctctcttcttttctaggttgtatgttttctctcttcttgaatactgagagatctctgtgggtggggctcaatctctgttcctgggatctggggcaggaccccaggcaaaggacagacaggcaccatgttgtctgggaacaggctgacaagccatgcagcttcacagccctccccagttacagggtccctgagccaaggggaagagactgctgtttctaaagaggatgtgatggacagttattgaggtgcttagctgggggctccactctagtcttaatctgagcagccctcaaggaaatcataaccagctcttaaaaacatattgagaccaaagcttgtgcgtgtgtttgagcggagcttcagacagctacttaacactgggggcctctgggcttttgattcctccacttctagcctgccatctccccccagctggctggtgcttatcagccaagacgttgtttaaatcatactcatttcctataaccatttcacttgaaatgccatcctctgctccagaaattcatctatcaccagcctaggggtatagttgaggagccttggggtgatcgctccccatctctacccctgcccccagtcacccctcttcccatgacccatattctcaggtttcacgccataagatctacttcctctccgtgtaacaggacacttagtgccagaattatttataacattgagatggcaacagggcaatggggagcagcccaacccatggacactctctctttgaaagctcgatcaatggacctagatcactgtttactacttggtgtctcggcctctgctgtgtttcctgctggctttgggggatggggaaacaggggtctggaccaggtcaaggctgttctcagagtttaagatgcttataaaccaggcctctaataaagttatgccttcactgtacctctattccttggccaggcacttccctgcctcaggtgagctctcttcttggaaatgaaccattcttggggctttttcgcaaacaggagccctcttcctcccccaggaaagctgacattatgtccctaccacagtggcagagctaggacttgagctgaggaagtcatctgatatggatcagaatggggatgtggaagattccgggagttcttccgaggaagggcttgaattggccccacccagtctggagtggaggtagaggggtggatgaattcacttcttcaggactgaaaacctttttaccatcctcttcctccccattcatagccaattactcgttgtcctaatttgaaggctctgttgtctggactggaggatttttacccattttccagcccctctccaggtctcatttattggggcagtgtcacattaaagacattgccagacttcctagtccttcccaaaggcctgacccaactccttcccaaatggtgaagcacctctgcctccttccctttacacctgtggacctaccacactggggaactcctaggtgagtcccagagaaagcccaggtgaaagactatgagccagtcagaagggatcagggtagaacccaagttgggacaggcaggggaggcagtcccagtctttaggggggtcaggtaattcccctttacaagccaaatgaagaaaaaaagttctaagggcagcatatgactccataaaataaaggacataattgggagcgatatctaatttatctattgaatgcctcctacatactcttttatcacttacatggacagaatataattggtgtgctgtgcgccatcaatctcagggcctgggcttcctgttctggctacacctattactgtccgattatgacactgttaatccaagatcaatgacattttaaatgtgctacagttatgggcaattgctgacaataaaaacagtgacaaattgatgaaacttgggcagagatgatctggtgtcaaaaataaaccataaagaatctgatttccaaactgagagaggtgcctgggacaccagcttagtggggaaagacccagcgagaagagaacctatcctgcccacatgatcttggccactcaggaagccacctgctctggaaaactccctctaggctgacttgaaaggccccagcaggaagatggagaggtggtctttggttaaggcttgggttccctttagagagaatcgtcatcactgagactctgggaagtgtctgtgtatggctgccaaggtgggggccacacaaactcactgagatactggtggggggtctttcatgtcctgcccacactgaggaattagggcagactggttgagtcatagaatcacaattagccaatgttaaagctaaaagagaccttgagagtctctcttcatggagggtcaggctctgtcctccaaactgtccctcagcagagggacctggatcttccctaactctgcttcaacttgccccaggcattatttccccaggctaatccccttccccacctgttgcagggaactccaggccttcaacaagcagaactattttggcgtacattaaggtgggcctcctccagctccttttttttttttttttttttttttagatggagcctcgctctatcacccaggctggagtgcagtgacaaaatctccactcactgcaagctccgcctcccaggttcatgccattctcctgcctcggcctcctaagtagctgggactacaggaccctgccaccacacctggctaattttgtgtgtttttagtagagatggggtttctccatgttggtcaggctggtctcgaactcctgacctcaggtgatccacccaccttggcctcccaaagtgctgggattacaggtgtgggccaccatgcctagcctccagctccttatttttaatggattaccttaatttgtagtattcctttcatacatttttctcactttaataatcacaattttaaatatgaatactttagtagcattgctaatactactttacataataatactttagtagtatcgctaataccactattacaaggataactactattgggaagcatttattgtgcaactactatatgtaaactctgttccaggtgtttcatgggtattatttttcatccccacagcagccctgtgaggtgggtattgttcttcacattttagaagtgaggaaacaggcctagagttgtagtgatgtgcctaagatgacacagctgataagcagtggagcaagaaaggagcctgagatgtggctcaacattcatcttttttccattgcccctttcacagacctttatagtcccatttatagacggggctgagggcctccctaaagaatctatagctagtcaaaggcagagctagacctaagcctagcttttctgacccttgtcgtattagacctgcattgtatgtatttttttttttaaagactggtcaagtgcagtagtgagaagggagaaggagcagaacaaggagtttgatctgtaactgattgtgaacaatcagttgagataaggcactaccttcggaacaccccccacactctttccagttgcaccacaacagtcctttccccagatcaccaccactcactcagccagagtcttcagccttggcctctaagagtcagcagggggtcacagttggctttgaaaccaagcagacaggtgtttgaatccccactctgccaccttacagctgtgtggccttaggcaggtggttgtgagaatttaaatggcataagcatataaaagcatttggcgtagagtctggcacatagtagtgctccctaaatggtagtcattaaagatacaacctgggacagtggcagctagtttaacaaaccaccatactccgtagcacctctcacctgggtgcaagtgccccaggccactgcagtagctgcacgctgagggtgtccccggatatataagaagcctctccgagggccacagaggttttttgatggcagatggtttaaaatatcatttttatattaagttgtataaaatatactatgttataaaatgcaaagtttgcatcattttagagctaaaacttaaggccacaaaaagaatctgctattttcttattaataaaaaatcctatttttatataatgcaaataatgaagatgaagtaacctattatttaattaaacatgtctttaaaaaaaaaagaaataattggtccttgctaatggcccttcagggcaagcccccagactgctggggtcgaagtttaccctcctgcctctaatatcaaagggactttggcagaaaagtttgagaaaccctgtcaggaacaaagcctacacaaggaccaggaaatctgacttcttcattctttaaaagaacaaaacaaatagcaacattgttttttctaccttcctactgttttaccttcaagtttagcattaagaacatgaaatgttttgtttaaatttatgattcttatttctggttcctttctgtttaataattgctagctgaatcattaatcatcaaccaagtgaatggtcacactttatagaaggctacaaggtggaacacaagattagttggattcttaagaaagaaactaaaagctgcttgtgacttagatgctcttaagttttatgactgtggtgggaatttgagcatccaggccttgcttctgatgatcctctcgttccagtgccccagttctaatcctctgtgggtgccctcagtaggcacaaccttggggctgcccagggctcaaggcatccatgtttttaaagtgcccaacaatggcttttcattcatcagaaactccacaggacacccacctaactggggctctgatacctaattcagcagcacccaccaccaagtctttctaagttttatttttttaatattacatgcaatatatgttaattataaataaatgtaataattcaggtaggtgaaaaggagaaggagaaaaggcccaagaagtttccccactgaggaagaatcctgattagcgaggcaagtcacgtgacttttgggaatcttgttgaatctacacccatttaaagtggaaatctatatagcctgattctttgatggtttagagctctgctcagtttagagttcagggaggtggtatctacagggtgtattgctctgataaaaattagcagcctgctcaagttcaaggtatgaggggactgatcacagatttgtttgagaatcattacgttggccctttggtgactctagggattagatccagagtacaaggggcccacacttccaagggatcccaccacaccttcaaatagcaggctcatggaaaggggattccaagattctccccctccagctacggcattgctttacaatatttaacattccttcactaaagagcaagtctaaattgcaagtactcctaggacagggactagcttagatccatgacagttccctctctgagagaagggcgtgccttactccaccggaccaaacaaaactaaagtgacctctctgctccccccagagaggggcactggggatggtaaaagcatttctgtctctgaacccagggatgaagtagagaaatgccacttaaccatagccaggacccaaagaattgtgagaccaagctaccaaaggctcaagtgaggggctggaaagagtgacaaaaacagagaaggacagatctgtgagccaccgcacttcatttaggaagtcagtgctagggtaacaggaaggatcgggcgggctgtcaggagagtggaacgtgttagagaaagaacaaaactgagtggagacgcaagggaagagaccgtttataggtgaattagcagcagagggtgggtggtggctgtgcctggggcaggggtggtggggcgaggaggtgggggtggcagtgactttgagggagctcttgcagagggcagccttttaaggtgaagagccagagctctgggtcttaagagttgggaaagcaggttatatttcacatccttccctgaatagagaaattgaatttggtcaagaataggtcctaagaaacagctgtgagcaccccacttttccatcttgttgatgaatatggagtgggagcaaagttgagtgtgggcatctgacaaggtctttatgatcctagatgcacttactataccttcctcctcctcctctgccttggctaatgtgctgtgggtacccactgcacagagggctgtaagacactcattgtggctgatgcagaagctgggccctgccctcctggccttctgaggaaagtgattattgtttttgtcttgtttttcaactatccctttgcccccagcaggactgaacctttccactcttaccatctctgggtcccttcagatcttttgtagccttgaactacctgctacaagatttttttctgtcctaagaacggaagtccggtctgcttcctaacattaatcccttccacaccgcacagcctcgtttcctctagatcagagagatggcttctggattcttctttccctgcaatccagcttcttctcctggggccctcatactgcagactgggatcatcatccaggcttttgcactgggccaggaatttgggagtcatcctggatccgtctgcccctgtcaacctttctctgtcaacagatatttattgggcatcttcaacagccaggccctgttcatggtgctgaagaacagcatgtataaaacaaccctgccctcacagggcgatcaccagtgacctgtggtgtggagtctccttttacctctgtctcctccttcccattgtcaccatctttggtcctcctctgtcatctggaatactccacttggtaaccagcatgatcttataacgctagttttacccttgtcagcactttgccgaaaacctcaaataaagactttttaaaaaatgtgcgatggaaaactaaagttataaattatatcataaccattggacctctttttaaaatgcactgaagacttataatgttattcatggatatatatctatggtaaaaatagaaaaaatatatgatggtggtgcctctgaaagggaggggaatggtactggggaagggacaaagggaacttcaactttatctgtaatgacctctttattttgaaaactcaagagcaaaattgacaaaattttaacagtaacttaacaaaacctcaagtctggatagtgggttcaagagtgttactttatacggacaggcagtgactcatgcctataatcccagcactttgagaagccaagacaggaggatctcttgagcccagccatcctcccgccttggtctcttgaaatttgagactagcctgggcagcatagtgagaccctgtctctacaaaaaaaaaaaaaaaattaacagcaactcaggaggctgaggcagaaggattgcttgagtacgggaggtcaaggctgcagtgagctatgactgagccacttcactccaacctggatgataaagcaagactctgtctcaaaaaaaaaaatttaaaaaaaagtgttccctgtaatcccagaactttgggaggctgaggcaggtggatcacttgagctgaggagttcaagaccagcctggccaacatggcgaaaccctgtctctaccaaaaatacaaaaaattagccagatgtggtgggatcagtctgtagtcccagctactcaggaggctaaggcaggagaatcacctgaacccaggaagctcaggtggcagtgagccaagatctcaccactgaactctagcctgggcgaaagagtgagactccgtctcaaaaaaaaaaaaaaaaaaaaaaaaaggagtgttacattagttgtctatattgtagatacacttgtcaaaatttaagccataaaaccctcagtgtccctcactgttcccacccccttagcctggcatactgggtctttcacaagcttgtgtcaacctcctctacagactcatctttacactgagggacttgcagtttccaagtgctctggccttgcagcctttgctcatgctgttctcttctgaatgccctttcctgctttactactttgttcttgcccttctggattcagctcctgggaggccctgtggattgaagtcagatggctcaagtaggcagctggttaggacccaggagacagaaacgtgcctggggaggacaacactttcttgtcctggtttctattcagctgcaactagagaaacagatcacctgtttcttgttcaaaactaggatcagtgagaggagggtggaaagagtaagatcctccacagtgccctcccacctcccagcctccacccacatagcctagctccaaggcagaaacttcccagcagaaaaaggaaaactgataaactcattccttggtctggctctgttaggattatcatctggtttcccctgctggtgttggaagagctgtgttggtgtaggccagtgctatcctgtgactagagggaagaagctctgcctgggcctgatttggccacagctcctagtaatatgctgagaaggaacacaaactctaggcccaggtcaccctccccatgccatcccacacctgacttctgcgcaccttgtgagcagatcagatttggtgttgcttcttccacatcatcctcgcatcccctttcacagactcggatagatcccctcatgggaacctatggatctatggcatatctatagatataccaccccatggcaactgtcctttccccttcatagcatacatcaccctgaattatagctacctgtttatgtatgtgtcttctgcaccaggtggtactctctgatggggcagggattgagtctgtcttgttcacagttgcatctccagcacctgcaactctgcctcgctcagagtaagtgctcaatactttttgtttttgattgaatgatagaatgacgagtgaactctatttcccactagactgtgagcaccatgttgacagggaccatgccctgatcatctttgggtccttagggcctatatagtgcttgccacataggaggtgctcagtagacacttatcaatttgagtgaatggacttcagtttctccacttacaatctgagtaagaggaagatattctttgccctctctccctcattctccagccacattgggggttgtggttgatgccatgaggtcgttcctgccttattcaacttcatgtccaaatcttctaatggcaaaacacaacatggtgaccaagtctcagagtccaggcatccctcccatagcccatagccaagtatgggagaagggtgcttcagggtctctctccattcactttagtctccagcattagccaagatcccactgtctaccctgaattcttcctgctattgcacaaggcttctttcatcttactgtattgtcagggaaaatatagccaagattatctgttcctcaacctgaagtaaaatatagattctgcctaattttagaaccggtgttagccagctgtggtggctcacatctataatcccagcattgtaggaggccaaggcagcaggggaatcgcctgagtccaggagttcaagaccagctggagcaatatggcaaaaccccatctctacaaaaaaagcaaaaaaattagctgggtgtggtggcacacgcctgtagtcccagctactcaggaggctgaggcagaggatcatttgaacccgggaagtggaggttgcagtgagccaagatcgtgccactgcactccaacctgggtgacagagtacaatcctgtctcaaaataaaaataaagaataaaaccagtgtttccacatctggaactttcttttcaagtttatatcacctctccttccaaatcagatctcccctcctccaggaagtactccttgattaagccaaaaatgttttaattttcaccacttgtcctattactctgcatccccacagcacttgtagtttgtacttattccctatcctgtttaagtgtgtgttcatcatcctaaccatactgcataagcaggcactattttaagtaggcttcatagattatcagaaattgacaagaaaaaatacacaccgagaagaaagtagaagaggattttttcttttcttttctttttgctttatcatagaattccttgtcttggtgcttacaagctgtgtagcacaatgagaggagaatgtgatttctgcaaaacatttcaggaagcacaaagtatctgtaaatacccaggaataatgaccatgtattttatttgtattatttttctaattcctccactatatagtgtttgcccaaagtccttgatttaagcccttgagtgttggttggctgacttagctttggattgtggtccactgagatcgctggatctttttaagctttagagttatgccctgccatgtggatgcaggtggaggaaggacttctcagtgtgacccatgagaggagtggctttcctgggccccaggccccaggctgcatgtgtatgggagggaggaggagaagcaaggaaaggaggagagacagaagtatatactgagctggtagttgggggaagggttggcgggtggggagaaaggaagagaggagtctgggccaaggcagaggtgtctccctagggagtcctcagagcgggcagccggacgtcgctccatccttcccgccagatggatgggtctgctgcgcaggcacaagctgtcgggccaggccctgccaaggcagaacagtggcgcttctgtgcgcactgctccgatccgctccggaggatggggcccgcccgggaagccagggagtgatggagaaagcagatgtcccagaacaggagccgcggggtcacagaagcacgcctgcctcccgaaacaaggagccacaggatgaggtgggaggggaccgggaatcaacgcgggggagcgtttgggggaagtgttggtcgaaagaagagaggcagaaggacgcgcgctgaaggagcctggggatgaagagctcgatgatttggccacaagccccctcacctttaagaacaaagcttcctgccttcagttgcagagttttgtttcgcggtcagatgctcagagaccttccaacctgtcccccacccctcagccttgcccatctccacgggctcggagaccaccaccctccgcctccgcctggcctggcccggcccgcgagatccctgacgctccagttcggaatctgggatccgcaggctcccagatccgccgctggcccggctcccacccgcccgtcagccgcctccccctcagcgttaattaaaacttgcgagatggagaggctggcgcgggcggctccgtttaatttgcagcatctttcatgctgctgacgatcgtaaagggctttcatattgaaatatgggccattttcccagctccagccctcgccgcggctccccgcacccccacacccagccaccccgcgcttgatgaaagagcccctacaaatccattaaggagagataattgaaaactctggggtaatatttaagaccgtgtgccgacgcggggtggagggcctgactgcgcccgctttgcccgtcagtgctggtgcgtgccagtccctagcgctctaggcccaccaaggccccgcggacgcccagccaaggcccgccatcttagcggtgcctcctcactccctgcactcaaagggctggctctgcgctaatctggctctgctgaagacttgcctggagacctgagttccaaaaggagccacagggcatgctgtgtgacagatgcattagggccagcatgcacgggggccaaagcatcttgtcccactccttcagcttcggtttggtgcaccagcatcaggcactgctcaagcttctgagcacagcatcccctctgcctgcaaactttgccctccagcactttctacttggggaattgctgttcctctttcaaaaccaccccagttccaccccaagtaatggcgcagtggggtatggaacgtgggtgggagtatagacactccaagatcctggtgtgaccattgttgcagctgcatgatgaggacactatactgctctgttttcatatgtttttaatgttccacgacaaacatgtttagaaagcagctgaagcatcttcttttacgcctccctctcccataaatacagactacctgttatcttgtacattgatgttccttagcacatcgtgttgccattatctgtttaaagtctttctgcctactcagctgtgacatcttcaggacagggatcaggtctaaattcactccttagcccttgctccaggcccagtgcaaggcacataacatgcgctcagtaaacatcactgaataggctgctctctgggtacctagaagtctctagggcttaaggttaggatataagcacacggaaggagggtagggcaaagcatggaagaggggtgctgtctgtgaggctgggttggggtcatgtctctctcccacaatgactggcttcaggatgttcccagaatgggaaaagggtagaggaccctgttctgcactgtgatttaggaatccttaggtctctacctgggacttttggggatgtttctccacttcactccatttggcttactctcccaatcaggttagacacacacacacacacacacacaccaacaccacacaccttagacagggaaagagtgggaaagagggaagcagaagagattatttgaagacctacttgtgcaaaaggcatgagtagttcaggcattgccatggatacccagctaaccccctaccacagggcctttcctacttacccctgttgcacagtcttccccaacactgtgtccagcacccatacaggagttatactcacaggatggcactatcaaggaagagggggctgtattgactcagcccccccaaccgcacattggccctgaagccacagttgcaatgatgccctctctatggccagaatgagatccaaaccattccaaagttccatttccaaacaaggactcctcgttagaaccacaaaacatcagagctggaggcaaccaaaacagcactgtgtcccctcttagtatctatggggcaactaagacttagaaagggcctgtgatgtgccccaggtcacaaagccattggtaactgggcgggtagggtggctcacgcttgaaatcctagcactttgggcggccaaggcgggtggatcatttgatgtcaggagttcgagaccagcctggacaacgtggcgaaaccctgtctctactaaaaatacaaaaattagtgggcagtagtggagtgcgcctgtaatcccagctactcagggggctgaggcaggggaattgcttgagcctgggaggcagaggttgcagcgagttgagatcataccactgcactccagtctgggcgacagagtgcgaccctgtctcaggaaaaaaaaaaaaaaaaaaaagccattggtaacaaaaccagtgctagtgctagaatcccagcaagttagtggtggagctggaattagaatcccaatctcttgacccacttaaatatatacatttgatattcgaagtgcttttcacaaacattatctcatttaattctctctctctctcgataggatctcactctgtcacccaggctggagtgcagtgacatgatcatggcccactgcagtctcaagctcctgggctcaagcaatgctcccacatcagcctcaggcacatgccaccacacctggctaatttttgtatttttgtagagacagggtttcagcatgttgcctaggctggtcttgaactcctgggctcaagaaatcctcctacattggcctcccagagtgctgagattacaggcatgagccaccgtacctggtctcatttaattctcacaaacctatgagatagcgtcacaattcccatcgacagatgagaaaaatgaggctcagggagagccatgatttgtccagtgtcatacatgggtggaaaacagatccaggatttgaaccccagtttgactgggtccaattccagtgccctttccactcacttctccagtatctccccctaaaccccacccagccaagtcaggccagtttcccagacactcacccttcatccctggacatctccagccagaggtcttttttctccttagcccagcttcccccacccagggcaatgttctttgccccagatttggaggtgggggtgtggtagtccccaccgtggttctgggtacaggcctctatgaactgaagccatgcacagcctggcatcctgtgtgcagccctactcctgttcgtggccacggaggcctcagccataaatccccaggtcttggctcataaccattagcaagcgattgggttcatcaggacgcctttatgagactggagtcaaataaatggattgccggagatcaggaacaagggatctccttgtcttgccttgcttccaagttgctcccgcaacccagaggttggcagattctgtttgactcacagctgtaggtggaagtgggggcattgtcacagtgggataaagatgtacagtatcccctggtactccacacccatggaaggaaaagcgcttggagatgcacatcctcagatagcccacagtcattagggctggaggaacacacacacagaggcacatatacacactcagacccccatctctgattcaaatccactcttcagcaaccaaccccccaaccccacccacctcacatcctctgatgtcctcacactccattcctcctgtgaggtatttcctgaaacactgcttctcaaacaccactgtgcatacaaatgacctgggacgtggttaaaatacacattctgactcagtagatctggggtggcacctgagctctgttttctaaccagcttccaggtaaggccagggttgcttctccaaagattttaagcaatggtcctcccacattggaagggtaggggctttcaaaatgtaaaagagataggaatgtgcagtttggaaaagctcccctcccactcccatcccccaaatgctgctgtgcacacccaggtgactgaactgtttctagaatgctgttacctcactctttacatggctccctctcattcttcaaacctcagcccaagtgtcacttcctcagagaaactttctctgaccacccaatttattttattttactttattttattttattttattttatttttttgagccggagttttgctcttattgcccaggctggagtgcaatggcacgatctcggctcatggcaatctctgcctctcgggttcaagcgattctcctgcctcagcctctcaagtagctgggattacaggcatgtgccaccacgtctggctaatttttgtatttttagtagagacagggtttctccatgttggtgaggctggtctcaaactcctgacttcaggtgatccgcccgccccagccttccaaagtgctgggattacaggcatgagccactatgcctagctgaccacccaatttaaagggtccctgctccaccctgtctgtgattacccacttcacaacaggtctcaaaattgcatgtatctatttgctaacttgcttacttatttttttgtctgtttcactctctgaaatgtgtggtccttgagttcagggattatgcctgttccatttattcatgaattcttggcaaccggtgcctagtgcatagtacatactcagtaaatactgctggataggccagtcacagtggctcatgcctgtaatcccagcactttgggaggctgaggcaggcagatcatttgaagtcaggagttcgagaccagcctggcaaacgtggtgaaacctcgtctctactaaaaatacaaaaattagctgggcatggtggcacaagcctgtaatcccagctactctggaggctgaggcaggagaatcacttgaacctgggagacacaggttgcagtgatccaagactgccactgcactcccacctgggtgacagagggagcctctgtctcaagaaaaataaaaaataaaaataaaaataaaaaaataaaagaccatctgaaagagtatctgaatccagcactgaggccataggtaatctgagaaagtatcttggaggaaggaaaatgggaggaaaagaacattgtgtgaaggacttaagaaaggtgactcaagggaagtggggaggcaagggtatccagataagattggccccattggtcctgggttgatatgacagggttgaggaagggtcctggagggagagatcctgcgggtagcagcagatgccgcagggtctcggaaaccatggcaggcactaagaagatatgtgggcttccctccacctcatggacaaggaccttcatttattcattctttcctacacttgacaaattcttactgagatcttattaggcgccaggcactgtgctgggtgctgaatattcaggaatgagcacaatgggtctggtttctaccctcctagagattacagtccagtgggagagactgacagtaaacatattaatatgttacagttgggccaagtccacaaaggatagggtatgataacaggtatgatgggcggttccctagggagaagtttccctagggagtgacagtcacccagagtgctgatgggtggaggtcttccttgccagccccctgctaagctttcatcctggacattcctgcattcctctgcactgtccctttaagaggagcatctcttccctgagcaaaggtggttcgggcacacagcctgagcctgccaaggttgtgggccataaatcaatgctggcactcccttggcagtgggctctcctctgagctgcccagatggcaggcaagcctggggctccaggggcagccaggcactcaggaggggggaggtgggaaaggtggggacacagttgggccccaggctcctgatggcagctgcccacttctgtctaagggccctaggccagggaaaatgccaaagtccttctattctagtcccacgtaccttctgactcccaagtcagtctggcatggggctgttgggattattgttcccaccccagccagggaccagggcctcataggcatcctctgagaccaagggtcttggatgacctcttgggatcacagtctgctctaacattcaacctgaaagttctgcctgtggtttgaccttctttcctcttgctgtagctgaggtgtcttcttttaccctgcatgaaagatgaaagacagtagctccccatttagtgggggctttgggactgtgtgatatctccctctgccttcactttaagcctcccagaaaagcaggataaaaagatgcttcaaggtcagttggagagatggaaccctgccctcttgggggttgccatccctctgccaccctcacaggtgctgtgacagagggaacatatgttgctcctaccccagaggacagagacaacatcttaacagccacagccccacagagctgggctcagcaggccttgacagaactggaaaggcagcctctctcctgggcctgggcctggcctgagtctgggttgtgggcggaagggtagaagcaaagcctgtagacccctcccagaaaggaatcaataggctggactgctctccccacgctcactcccaaacagtagaacagtggaaaattcatgggttccagaacaatagagatttccttggatgtccttgtcctcagattctctgtgagaagtcagagtttacaagtccttagagattctttctcacacgctcatcatacagatgaggaaactgagatgcagagaagttcacccaggtctttttcaggttgtttttactacaccacatttgccacatgaacagaaactcccagagttatcactaagcaggatgtattagactctaaaggtagtagcatagatggaggttagataacaagtagaactttctcagaatagtaggtcacagaagaagatgagaagcaaagtaaagaaagtgcattctctaaaacagtagggtgggggtgggagggatggagccaaagaatcaggataaaattttgcaaaaagatagaaatatagagaacacaggaaagggagctggcatagagcccagagcaaggacaactggggtgtggagcttctggggttcttcattcaggacccctagatttcatctgtcccaggcttctgggtatcagcagtagtttaaagtcagaccttatctgggctgattctcttggctttctccttgttttcctgggatggcttatctggctgccagagtcatttgccttctctaatttgtgtttaaattaaagttcccacaaacagaggtttaatgtgctgttaccaagaactcccaggccccctgcagctctgggaagttgaaggggctggggagaagaggtcagtctgtgcgcatcccatcgaagctgatcccactggcattggacctggagtggataacccaaataagtgtctccgtccttgctgctccatccagaatggtgatgacaaggggcagggcagggaaaagcatgctcacaaagggcctggggccaacatgcttgttcaggggctcctgggtggctgttcatcctttttcaggatggtgaggagaaggcaggggaggtgggcaatgagaagagggcagggggtggaaaataaggagagagcaggaggctccattctttaacacttgtgtatggcgctcactgtgtgctagcactgttcctgggcacctcataactacaaattcaacctactacacaacctgtaaggcaggtgttattaacattagccccatttttatagatggggaaacagaggtatgcccagtatcacacagctactaagatgcagatacaaggagtcaagccagtgccgtttagctccagattcccagtgctatgttgacacttaagccaaaatttatctgtcaccctcccaatctcttgatcacaaggtgaggcttctctttgccagagcaactgagacaaagtgaaactcccatcctgctccccagaactttacctctcttggccgcagtcttctcatctgtaaaatgaggataagatactaggaggggttgagggtccgggaaggtttaatgagacagcttgtcagtgaccagcacagggtaggtccccagcagtggctgcttccttctctgtagtctaaccatgagccttcctgctgtgccttcctgcgctgcctcttaactttgctttcaaaggagctagcggcagtgatcctcgccccttaaagaaaaccctcaggagagcgttgttcctcattcatttgtccaaattctctctcttcctctgggaaaccctgaaaaagagggataatagagctgaactggagccccaacctgctctgtccccacctcctctgcacccaggtgagccagtcagggtggcaacagaaaataaatgacacattcgaaagggtttcactgaagggtttagtgatgtgacagtttctaaaggcatagatcagatgaagaaaactaataagggctagtgtggcaccaggatagaaatatctctaccaaagcccgatgccaactggggtcatgggacacaggagagaggccactcagcaaagctgtgaccatggaggaaccacaaccaccaccagagcttcaggcaggcaaaaaggggggctgacagggaatgggggaaacaaataccctgactcctctctccccgttctcagctgggacctctattggccgagagatcagggggcccaggtgacacagtctgcagaggtcagcctccctgggcagagcagcacagagaacacagtggggcaaacagaaaaccatccccatcccatcccacccgcgagtccctgctctgataccaaagccttctctctgctgctttattgccacctctatcactacctgcagccaaacagtgactgacagggaaagagagtcaagactccttcaacgcaaacactccagctcacaaggaaggtgggatccaggcagagggcagcttgagggaagagggctgtgtctgaagggcagcagggcagggactgcccactcccagcatggagagacaaagagaaggaccgcactgggggtgaggatgtcaaacggcgatagtaaatgactctctttcctcagcatatgatacaaatcactgtgcatcttccttcctcctcccctctctagaccgggagcccctgtggggaagggattttgtcttgttcacccttgacatctagcacagtgcctcttaggggcataatcagaatttattgaataaataagcaaatagatatgtaaacgaatgaacaaacccatttgcagctcatatgcacagccctgggccctggtcagggagcactgttgaatgaatgacatgcagcattcctacagtagttttatttcaatcggttccatcatttaccacttcaggtttcctttcagccactcagtcatgggccacacagcccacgtttgtctccacgctggccagaggctgtgctttgatagcacccactcaaatgtgcagtgacctcatcaggctcctcctgatggaggaataaggggagtagcaagtgacttcctttctcacagcagcctttctgtgagctctctattgagagaaatcttgatccatggcaaaccgtctgtggtattctcggctgtagcccttggcgggagatgggaggagggaatgacagtgccaaggaggcagctgaaggatcgtcaccctgggagccacagctctggcttccttttgccaatgggccataaagactgagggaggcaggtggaagcaggggcaccagactaacaaactagagtttcaagtgtagtccccatgcaaagcccacctggcgaagtggttagacacagatgctggggctgggctcaagatccctgttctaccacctgctggctgtacaaccttgggcaagatacttgattaccatgcctcagtttccacatcttaaaaaatgtgaataacagtaatgcctacttcacatggtggtgaaaaagtagatgagttaatagttatgagatacagccaggcctggtggcatgggcccatagtcctagctactcagaaggctgaggtggaaagattgcttgaacccaggagttcaagaccagcctgggtaacatagcaagaccgctccctcctttatttttttgagatggagtttcactcttgttgcccaggctggagtgcaatggcatgatctcagctcactgcaacctccacctcctgggttcaagtgattctcttgcctcagtctccggattccagggatgaaccaccacacccagctaatttttgtgttttgcatttttagtagagacagggtttcaccgtgttggtcaggctggcctcaaactcctgacctcaggtgatctgtccacctcagcctcccaaagtgctgggattacatgtgtgagccactgcgcctggctgcaagacacccatctctctaaaaatgaaagttttgaactatttaggagagtacatgatccatggtaagctctatataaattttgttacataaaattaaggttctagtcccataaaccttttctgtaataagctgctcagccttagatacctctcatatttgctgtgagaagtgaacaaatgcatgtgaaaactgtaatgtgtttataatttttattatttgtcatcaagatcatgtaagagacctgatttagtagagggtgaagggatgcaaaaggggctgtcagtcatcaacttttgattatctgccttgttaaggtccccttcttgtcaacatcatcagctctttggcttgttcaagtcttttgttgacaatatccaggcttctcatggtccctcccacacacaacgggcacacagcaagggctggaaggaaaaagcctttgaaagcaaaacgggtccttcccttccttagccttgaagcgggaataaccactagacagaaggctgtgagggagtactctggcactttcactgtggctgctttgcctttgggcaggaggggaaactgatcagctccctctgtggtaaggctgcaggaagagatattggcatttgttatgaagtgctaggaataaaaacacatacatggccgggtgcagtggctcacgcctgtggtcccagcactttgggagataggagcaggcggatcacaaggtcaagaatttgggaccaggctggccaacatggcgaaaccgtgtctctactaaaaatacaaaaattagccaggtgtggtggcggccacccgtaatcccagctactcaggaggctgaggcaggagaatcacttgaacccaggaggtggagtttgcattgagctgaaatcatgccattgcactccagcctgggcaacaagagcaaaactccatccccccaaaaaaacaaacaacaacaacaacaaaaaaaacagaaaacaaaaaacaacaacaaaaaaaacccatacacacatacttatcccagtgtccagagcaaatgttctgccacttgctgctatgggtgtgatttcagatagctactttaacctgagttttggtttttctcatcttcaaaatggaaatattgatgcctaattcaaagggtgaaaattaatgaactatagaaaccccttggtgtatgtctggtccaataaatggtagctcttattagctaacattttgtaatatctgcccactatctcctccaagggatggagaagtaatgctgacttccagactaggaaaggtagtggtagcagaaagtgatttacaactctgacttttttcacattttctttccagagcacatagtaagttcttgttggttcattcattcattgaacagtgtttagaagtttgaacaagcttgaacaacttgccatcattttgttcacttgtattcatcttactctcaccactagaactgcaaggtccatgagggcagaggcagtgtctgttgctgggtgagtgactggattgacctcaaagcatgtctgaagactgaaatggtccaggcaaggagatggaaactggaggcctggattctgggctcagtcatacctccaagaacataactttccctagaacctggagccttcacagaccttccttccactgtgaggcactggagaatcacttgagaccagactcagggaactcttccctcatgggaagacattcattcatccactccatgtctttgaagccccaagagaaggatctgaatcccctagtctgaagagtcagcaagtttccaacatagctatcatgataaaaagggagaattgataaaggagggagcagccccacctcagtaacaatagagggaggaaaattccagctagtacatgtacttaatatgaaagcagacatgtgccaagaccctgctttcatggatattaggtgtacccaaatataagaaacaccaattcttgcccacaggcctcactggatactatccaagatgtctagagaatgagaggaaagagagaataataatatccaaaaggtggaaacaacccaaatgttcaccaatagatgaacggataaacaaagtgtgatatacccatacaatggaatattagtcagccttgaaaaggaatgaagtactgataaatgctacaacatggatgaaccttgaaaacactatgctcaatgaaagaagctagtcacagtaggtctcttattatatgatgccattcatatgaaagtccagaatagggaaatctacagagactgaaagtacattagtgttgttaagggcaagaaggaatatggggggatagggaggtgatagctaaaggttacaagatttctttttgaggtgatgaaaatgttctaaaattaactatgatgatggtttgacacacctgtgaatatactaaaatcattgaattgtacatttcaaatggtgaattgtatgacacatgaattatacctcaagaaagttgttttttaaaaagacagcataaggggtagggggaagttgagatgaagcaggaaaactgtgatcagaaacaaagctcaggggctgtctagcctggctgccccaagtcgaagcctgcatttcatacaggcaatgttagggtagcccccaagccacgattcggaaagataaattgaccccagaaggtatagggctgggtcccttctcccctgacagctccctttctgtgtttttactggcacaagaaactctgtcatcttgtataaataggagaaatttatggcagttttccctcttcttctccctggtgggctactaggaaaggtccagggggaggagggagcctgaaattccaaaaatataaatgtggaaagactggagggtgtcgaggagtctctttgcctgccttggctctggccccagctctcctttccctttgcatgtttgaccatctgggtgatgcggagggcagagaactggtgcagcccattctctctgcaagcccaaaagagatgggtcccaaatctgatatccaacaggaggggcacaagggaaatcaaggaaataggcttggctgtcccatgaaattattggaggagacacagaccactgccctccttcctggatttggctatttttgtacttccttatttgttgaggcagcctgatacagtgggaagagaactcgtcctagatttagaaagattgacagagaaactaagtgtgtgaccttaagcaagtcatatcttctctccaggcctcacctgtaaaaagagggaggggactgaatttatcaggggttttcacatgagtttaactctggggtccttccttcaaataaaaccatatatagtgacccaacatgaacacgagtagtagcctgctgagcttcttgaaggtaagaatgggagtctcaggaccctgtggtgactggcgagaggcttgtccaagcacaagatgatctccatggcttttccagccctgtcctcaggagggatttgcccccatggtgaagaggctcagttctgcacacccagtgggcttgaaatccagctccaccccctcctgtgtgtccctcagcacataacttaccttccttgaacctgtttcctcgtgtataaactggaataatagtaacacgtatctcagaggattgtcacatagattacactaaataatgtgcatacagtccttcgcatactatctggcccaataaatatcattatagttattccgtgatctgatgtaatcagttttttgttttgagacagaatctcattttgtagtccagactggtgcacagtggcatgatctcagttcactgcaacctccgcctcctgggttcaagcaattatcctgtctcagcctgccaagtagctgggattacaggagtgtgccactgtgtccagctaatttttgtattttttagtagagatggggttttaccatgttggccagactggtctcgaactcctggcctcaagtgatccgcctgcctcagccccgcacagtgctgggattacaggcacgagccatcgcacctggcctgatataatctttttaatttgaaatatctggtgtgagaaggtgaattagaaaggatgacagcaaaactgctataacacaaaggccccaaaacacagtagcatatagaaaacagaagtttatttctctcttagtctgggaggaagcggttccagacagcaggcagctctgttcctcctagtcagtcagggacgtgtgttcctttcatacctttgctttgtcttctcttagggatatcttttcagttgcctggtcaaacctgtctcaggcacatctgcccagctcatgaaagagagaacacaaaggagaatttacccaatgccgtcaggctttgaggacatgctctcctcacatttccctgtgtctacacctggcaacaagacagctgggaaatggagtgtccagctgggtgtctctccaccctcgggcagcaaggaaagaagagattttagtggacaatgggcagtcttaatccagggctcaaacccacacctgagctgtcctcttcctcttctcttcccaaaggaagggaaataaagtctacagcccagaaaacaatgtgaccacccatcccctacccaatcaggtccctgccattcatcccaagatcagctgtttccggaaagtggcttggaagcctccgtccagaaagaccaccgttcggtccatcttcttcacatgggtggatgtgagaaaagtttctgtccccactgcctgcctgccactccctgtctcagtttcagctcatgctctagccctttgttcccagtcaccaagagtgactacaaatatgagggaacaggaggacctgaaacagtcatggaaattgagactgggacacagaagccaggctcagagacagcctaggtgagggttctcatgccaggaaatccagctactactgtgtaacctaaagcggggattaagctctcagaacttcaatgaactcttttggaaatagggataagaaacccacttgtcagggctgttgtgaacatcaaatgtgatcatgtatgtacctagtacatagtatgccttcaataaatggtaaggcaaacggaaggcaaatcaaattcatgtccattactctgacccagcctttgcataaattcttttttcttctccttccttgtcaatgcatggctccctccctcttctttatttcctatcctcattcccctaccatctgaaccctgatctggaatctcttttctcaggaaatcttccatgattgaaaaattcctgcttggccactttccactccaatactctatcttcacccatcttccatctaccccatggtcctggcccaagtttacacgtgtcccatccctcccttcaaaaagcatgcagcaatggaagggctttaagtttgtcatcaagcagatcagagttcagatgccaactctgccaagttctagctttagaactttgtcagatcacttcctctctttgaatctctgtcttcccaaccctctggtgaggtcaagtgtgtgtgggctggtacataaaggatatttaatctcctctgctctacccaacctcccccaactcacactcccaggactacctctctactaaagggagttattagaccaagaaagtaattctcccattaccagatccaacccaaccttgcccagggaaaaagaagtgactttgagtctatgggtcttggagggaccaccaacccaagagctagagcagaggaaagacttggatatcccagcttccaggtttataggctctctccccaagccctcatatgcagccccatttgcaggactagcttcagggataggagagaaagagttgatctgattccaatcttagcctgtaagtagtagctcacctatgcctctattttcaaccttcctagatcagaagagcaacaatatcaatgacaactaatgggtacatagtgtttcctatgggatggacattgttccaggctctttgtacatataactcatttaatcctgacagcagcctttgagctaggtactattaaccccgttttacagacaagaaaactaaagcacaaggggttaagtaacttgcctaggtcatacaactcacataaggcatgaccgagattcaaaaccaggccgtctagctccagaatccatcctgttaaccactctgccataaaaagagctaacatttactggcagtttctatgtgccaagcactgtggaaaacacatggcatgtatttcttctaattccaaataaccccctgagataagttctattattagtatccctgttttacaggtcaagaaactaaggcagagagaaaagttaagcaacttgccctgagtcacacagctagatattaatagtttcagaactcctagctgttttgcctcaaatcccacctccccacccctgctcaaagcccctccccttctaggtgggttgtttagttcctatcataagttcttcacaaatctgctttaccccccacagcctacaacccttgttctccaaaactcctgttgacctccgtccctttcccttcccactttctccctagtccctctgctccccacaaagtcccccaaaccattctgtctctctccctctgctccccccaaccctcctccacaactcctgctgaaacagatgaatttcaccaaaaaagaccatcagactttccccaagccgtcccccactgtgcctaatcgcacacccccaggggaggcaccacagtggctaagctggagagccagaaataaaatcctcattctacttccctgccccctcttcccatcactcatctgggaatccagggcgaagaagggagctaaagtgcagagcattcatttaatattaacaaattgaaatgaattcttttaatgccaattaacttggagcggccccttattaatagtaacttagattcatacttgggagaagcagggacgggggctgggccaaatgtgcccagaatgtcaatgtgactggggacctgaaagcggaggggtggcagttttgcttctgcccagttgggttctgtttccctgagagaaatggagtcactggaggcggatctctgggaaacacaaattactcttgtaagtttatttttgttacttcaaggaatctgaatagtttgaagccatgtcacaccattttaagagtttattttcacagtaatgctaaaaagaagaatttcctcagggctgggatttacttcaaactctctcctaagccaaaccttactgacaaaaggaacaagtccccaggccagctctctacccttctttgttcagagctagagccagggatcaatttgggcttcctcaatccctgccccttctaccttaacaaaaactaaaaggaagaatcaacactgtatgtctctctgagaagtctcccccaggaggtaaaagacccaaagggctgacccctaagctaacagcttacatttaaggaagaaaaacaatctgcctgcacttttcttagaatttaaggaaaaaatgagaatttaaaattcaatttcatgtatcagagttctccagaatacagccaagtggaaagaacttagtcccaaatgaaaaagttgaacagaaattctgctctcactcgttttgccagcttggaggtgagactggaggtgtcctgaactagaaccagagcataggttctgacccaagaaggacactgtctacttcccaggcatccctccttggctgggaggagaggggaggatgagtccgttggaagctgagaattgtggaagctggggatgggagttttgagatggaggaggcaggagcgtgaaggaggtcagggaaagacaagtaaatctactaaccattgcagtttataaaataaaaaccttaaaaatggtttaacatgcaaaaggttaaattttaaaaagaggtcaggttttaaagaaggtaaaatacctcaaatttaaacataataaaaatgaggaaaatacacaaaaatttcaagcaaattgttcttcagaagaggagaggttggaattaatcaaaagaccttttttacacacaccaccccaagagtttcccaaacaataaattcatttacaaaacaaaaagaggaatcaacacaaaacctcatccacatacagagaaaaataaattgtggtgattcggtaacagctgaaaaactagtgagggaggagaaaaatgaataaactctaaatccattaggtgatatttataaatagcaaaattggaggatggaatggagaaaggagttgcacttatcattaaagaagtaacacatgtgaaaacataaggtgtaactcatccccaaagaaaagtaaactctccataaagtagcaagtatagaaatttattgaaaaggaggaaagtaccactcaccccccccaatataagtgtattaatttgaattaaaattttctccaaatccgagataggttacacaaaagaatacaaaaagatttttttctttcaactaagaggaaaaacaaaatccgatttaaattcactaatgggacaggaagggaggctgtggtttgcaggtgctagtaaacggggtgaaggttgtgaagagtttgaggggtagaggaccagcttacctcgctttggagccgccgcggccaacaggagtgggcaaaggacgctgccagtgcctgagtgatacgggaaataaggaataggggattcgggtgcacctagacgaatgaggaggatggaaagactgggggtgcccatctcccttcctttgcccgcctccctccctccggtacccaggcctagagagttactgaaagttacaaattgcttccattattactcatcctgggcggcctggtcattggccagcccctggccacgtggtccctcgtagcaatcgatcgaatttctagtcgcaattctctgtccctcagctctggggagaaagtgggggctgtggcgtgggggctgaggtccagtttggggcggggtgggagaggagtccttgagtatcctgtccccgggccaaacccccaggagtccagtcttcaggacctccttgagccgacttccaccgatggagggggatcttcagggcacctgctgggttctcaggactcctcttcagatcctagtttggacccctctggattagaaaggatgggctcagcacatctggtgaggcaggcaggtcctcgctgcagcacagaatgatcccatggccctcaaagcgtggtgtcagctgaaagttcattgatccgtgagccctctgcctccctcctccgttgaaagagcagtggcgtgccccgcttttaaaagccctggggctcctgcaagcggacaccgctttccaggacatgtgcaaacagggatggtgcgaagcagaggtggagacaatgcgatcacgtgtggcactggcgtatcccacagcagatggtgtgaatgtgcgtcaccggaggcatatggggtgatggcgaaaccaacaatggtgtccaggcatgtgcccagtggaaacgggaaacaagtggcctttccctgagtgccaagggaactcaaagaagacctgggaacctggatggggcctgtgcctcagtccaagccacattttgaaatgcctgccagaggagcacagaggtttctgcaacattcaccccaccccgaagcctccaccgcccaggtagccctgatgcaaccttccctgcacccagccccaaacccatccccaggcccagcccagttcctttggtttcctgacattcattacagccaaaagattcaaggaatcagtccacctatgagtagaggagaggatatccctcatttgtgagacaggacttgcagaggaaatgggacaccacctgtcctagaagacaaggccagtcatgatcacctagcgcttattctaggcaatccacccacccatgaggtgaagcaaggagaccaaagaagcttccctgtctgagacacgcatggaagccaagtgttccaggcttatcagacctgcccaatccagcagaaacaggtttggagagagaaagagtcatgtcacgcatctccagaaagtgtctccctgatggactgggaagcgatcttcgtagaagttattagccagaccaagaggcaactaggcccctcagaaacaggggagacagagcaagagggaggacagagcagaggccagagcccaggcaggttacaggaccttgccactgccacgggcataaggggaggggtgtgaaatgtgtgacttgtccagagaggccagcattccagggacagggattgttgccgtctcccattcccggcttcctcctcagaattgtatcgtggtgtggcttcattgctcagagaagagccgtgcaggggtacaaccatcttcttggaggtgggtctgctcctctcctgccggacaatgagctgctgtggggttttgtcctgggctggagtgtggtcctcttgatcttagaaaagtggccgctcaggatggggatgagacttcgattgctccgggactgacgcgtctcctcacatgatcgaggacttcacaaacccaaagtggaaccgccgtgaaaatgacggacaaccggccaggggacccaggcagagacacagaaagaggctcaacaaagactggccgatatgcaaaaatttgcattttggtgaacagagcacattcgtccaaagatacacacacacacaggcatacacacacaaacacacacacacacagactgacagagagagggaaagaaacacacagagggtgagagacagagagagaagagagaacgggacacacacacacacacacacacacacacacacagtcctacagtggtggcacagaaacacacactccctggcaacccctgaggctaactaatagtggaaaatatgtatctaagaatacacttggaacagaaatgtgaaaaaccgaaagtaagaggtattatgaaggatcaaatataaaatgacccagtgctaaagaggcaacaaagaaaactgtagaagaaaatgacaagaggcattgtgccttaatgagtttgtgctactatatagaaaatacactaggctgggtaatttctgaagaacagaaatgtatttctcacagttccataggctagaagtccaagatcaaggtgccagcaggattggtgtctggtgagggcctggtctctgcatccaagatagtaccttgtgcactgtgtcttcaggaggagatgcactgtgtcctcacatggcagaaggcggaagggcaaaacaggggaagcccactccttccagttgtgtaaggatcctacacccatttgtgaagactctcccttcatgactgaatcactacctaaaagccctacttcctaatcctatgacattggtgattaattttagggggacacattcagagcatagcaccctatattcaatttcttaaaaattattttgttgttttgcttttctgtttttcaaatgacttaaagtgctcaaaattggattaatcataatccttggctcatagcacaccttggctcctatttcatccttgtctgtgcctgagcctctgtgtaaatgtatttgaacaatatggtaatcacttgtgaacttacaacacaaccaaagaactagggttctgaccctaacatctgctcctcctctgtccttttttctgattttccaccttcagcccgagggtaactaataccctgaatttatgtttaggattctcttcctttaaaaaaaaaaaaacattgtttgattgcatacatatgattaccctaaatgacatattatttagtttttaagggtataatttatttacccattctcctattaatttacccattctcctattaatgaacatttggcttatttccagatttttgctattatgaatggcattacatgagcatttttttttaatacttctggtacatatgggcaagagtttctccagggcctatggcagaggaattactttgccataacatatgagaatgctcaaatttataagataatccaaattgctttccaaagtggttgttctaatttaaactctcacctcctgtattagttcgagatgatcttgttgatccagtctctccatatatggtgatatggtttggctgtgtccacacccaaatcccaggttgaattctatctcccagaattcccacatgttaggggagggacccagggtgaggtaattgaaccacagaggccagtctttcctgtatgattctcatgatagtgaataagtctcatgagatctgatgggtttatcaggagtttctgctttggcttcctcctcattttctcttgctgctgccatgtaagaagtgccttttacctcctgccatgactctgaggcctcccccaccatgtgggactgtaaatccaattacagttctttttctttacacctctttttcttctcagacttgggtatgtctttatcagcagtgtgaaaacagactaatacagtaaattgataccagtggagtggggtgctcctgaaaagatacccaaaaatgtgcaagtgactttgaaacttggtaacaggcagagattggaacagtttggagggctcagaagaacaccggaaaatgtgggaaaatttggaacctcctagagacttgctgaatgactttgacaaaagtgctgatagtgttttgaacaataaggtccaggccgaggtggtctcagatggagatgaggaacttgttgtgaactggagcaaaggtaactctcgttatgttttagcaaagagaatggcagcattttgcccctgtcctagagatttgtggaacttttaacttgagaatgataatttagggtatctgctggaagaaatttctaagcagtaaagcattcaagaggtgacttgggtgatgttaaaggccttcggttttataaaggaagcagagcatacagttttggaaaatttgcagcctgacaatgtgatagagaagaaaatcccattttctgaggataaattcaagctgtctgcagaaatttgcataagtaacaagaagctgaatgttaatcccaaaaacaatggggaaaatgtctacaggacatgtcataggtcatcacagaagcccctcctatcacaagccgggggcctaggaggataaaatggatttctgggctgggccaggttcactgtgctgtgtgtagactagggctttgtatctctgtgtttcagcccctccagccatggctgaaaggggacaacatagaacccaggccatggccttgagagtgcaagcaccaagccttggcagcttccatgttgtgttcagcctgcacatgcatagaagtcaagaattgaggtttggaaacctccacctagatttcagaggatgtttgaaaacacctggatgtccaagcagaagtttgctgcaggggtggtgctctgatggagaacctctgctagggctgtgcagaagagaaatgtggggtcagagcccctatacagagtccctactggggcacttcctagtgcagctgtgaggagagggccactctcctccagaccccagaatggtagattcactgacagctttcaccatgagcctggaaaagctgtggacactcaacatcagcccatgaaaacagccaggaggtgggctataccctgcaaagccacaggggcagaactacccaaggctgtgggagcccacgtcttgcatcagcatgaccttgatgtgaaacatggagtcaaaggagatcattttggagctttaaaatttgactaccttgctggattttggacttgcgtggggcctgtaatccctttgttttggcaaatttctcccatttggaatggctgtatttactcaattacctgtacccccattgtatctaggaagtaactagcttgatttggattttacagggtcataggcagaagagacttgccttgtctcagatgagactggaaagtggacatttgggttaatactgaaatgatttaagactttgggggactgttgggaaggcatgatcggttttgaagtctgaggacatgagatttggaggggccaggagcagaataatatggtttgactatgtccctacccacatctcaacttgaattgtattgctcaggattcccatgtgttcggggagggaaccagggggaggtagttgaatctttagggccagtctttcccatgctattcttgtgatagtgaataaatctcacaagatctgatgggtttatcagtggtttcatcttttgcttcttttgcctccttctcatattctcttgccactgccatgtaagaagtgctgttcatccaccgccataactctgaggcctcctctgccatgtggaacccttaaaccaattaagcctctttttcttccctgtctcaggtaggtctttatcagcagtgtgaatatggactaatacatttcgtattgtcaaacttcttaatatttgtggagagaatagatgtgaagtatcttgtgcatttccctgattactaatgaggttgagaaaatttttatgttttgcaggctttctcttttgtgaaatccctattaatgtcttttcccaattttctgttgggttgctatttttaaaattaattcataggagctccttatacttagttgatatgatattaatcttttgtaggtttcagttactgcaaatatcttctctaatttatagtttatcttttcacttttttacttttattttttaatttctattttttgtttttgagacagagtctcgctctgtcattcaggctggagtgcagtggctcactgcaacctccacctctcgggttcagaccattctcgtgccttagcttcccaagtagctgggattacaggtgtctgccactaatacctggctaatttcttgtatttttagtagagatggggtttcaccatgttggccagcctggtctcaaactcctgatctcaggtgatgtactgttgggattacaggcttgagacactgtacccagcctatctttccactttttgatgtaaaaagttcttaattttgtgatagtcaaaatgtctactcttttttaatggttaaatggctttttgtgtctcattcacttacattttctactaaaagttttaaagtttttttctgacatgtaagtcttttgtccatctggaatttaatgtttgtatatagaatgaagtaggaatataatttcattttgtttcttatatcaataaccattatttttctattctatttattgaaaagtcctttctttccttgctgatctgccatgtcacctacatcacatatcgaagattaaatttgtggagatttgcttgggaactctattctgtttcactagtcagtgtatcagtgaggaccacactgtcttaattgctgtagctttataaaagtcctgatatttggcaggacaaatctttccttttcttcaatgtctttgatattattggccccttcccttttccatatatgtatatatacatatatatatggaaattatatatattatatatttatatgtgtgtgtatatatatatatatatatagagagagagagagagagagagagagagagagacaggcagaggtctcactttgttgcccaggcttgaggacagtggtgcaatgatagctcacttcagacttgaactcctgggctcaagaactcctcctacctcagcctcccaagtaactgggactctaaggcatgcaccaccatatccagctaattttttttaaaaattgttttttgcaatgatggggatcttgctatgctgcccaggctggtctcaaacttttggcctcaagcaatcctcccacctcaggctcccaaagtgctgggatcacaagagtgagccaccacacctggcttcattttccatattttaagaccatttttaaaaagttgctcaagactgcttttttctcttggtgttacttgcaacccccttacttagccttggaaatactgttagtgaagaaaatctaaagagtcaaaaaataaaatattctttcttttcttccaattgcaaaagagcagacaccctcctgaatcataaagctagttttgataaattggtgaactgagagcatacacagtattattaattctgttctaatttctgcttcactgtggagtgtcttcagagtcttaaaagattattgctatgaaatattcttatacatgtaacacaaaacctctacaattctgcagttgtatttggctgtcttacctaatactcagttgctttgcttcataatatttaaattgacatctctaatttccaaaaggcataaatactagtatagatttttagttaagccagaagaaagtagactttctttactaacatatcttacatgtaaaaatttaataaatctcccttcttcttttcttttgcatcataacaaccactgaaaatagtatttctatagcagttgggggtaaatggacaatgacttttgtggccagaggtgaatggcccaggggctcctgcactccaggtcccactgagcctgccacacagctgagggcatcagtatttccacacacctatagtgcatgctgtcccagaacacagatcagattctctcctatattcaaatggggagttgagagtattgtcattgtaattaaattaataaatacatatttatacactgttaaaatctggttggctttgtgtcccttcacaaaacaaattgcttaaatgaaaccacagagttaatataattgagtacatttgcttctatgagatgctcttttaagtggaattagaatctaatttgaaatgtcaattaaaagtttaaatattcaactcgattacattaaatttttgttttgttttgttttgagatggagtttagctcttgtcacccagactgaagtgcaatggcaaaatctcagctcactgcaagcaccttctcctgggttcaagcgattctcctgcttcaacttcccgagtagctgggattacaggtgtctgccaccacacctggttaatttttgtattttcagtagagatggggtttcaccatgttggctaggctggtcttgaactcctgacctcaggggatccacccacctcggcctcccaaactgctgggattttgggcatgagccaccatgctcggcctttttagattactttattttagttacttatttttatgactttattgttataaaaatgctaattttaaaaaatcaatcaatataacaaagaacacagaagatgatcaacaagcattcccacctctgtgatctagaaataactgtcatcaatccaaaagcttacacatgggggatcccttcacaccagttcacagtacaaagtaactccttgcttgtagaaaacattattactatcattattagttttgagatggaatttgactcttgtagcccagactggagtgcgatggtgtgatcttggctcactgcaacctctacctcccaggttcaaaggattctcctgccttagcctcccaagcagctgggattaccagcgcacaccacgatggcctgctaatgtttagtatttttgtagagacggggattcaccatgttggccaggctggtctcgaactcctgacctcaggtgatccacttgcctcaacctcccaaagtgttgggattacaggcaggagccaccacacccagactagaaaacattattcaatagcaaacattagcagtatgcttgggggttttaggattgattattttcaaatctctagaaaagctcaatgcattaccttaggctataatctcagggtagagtctcatctgttaatggggggctggtctaagggtccttccagctctcagtttcccatgttgaactgctccctgtcacccaccatcctcggtttttttagtttttacagagatgaggtttcactatattgcacaggctggtcttgaactgctggccttaagcaatcctcctgccttggcctcccaaagtgctggagttacagatgtgagcctctgtgctcagcccatccttggctgttcaagtgtagaggtaagtagtagatgccaagtttaccttcaggtcagaaggggcagatgccccagggcagagtcataaccctaaccaggcctcccactgcatgaagacattatgttctgaagcttaaacctggacaaaggtctgaccagtagcactgtgttcatgaatatcaggtcaaaaatttaaaactgggactatgcagaagaacctggtagatgtaggtgcagtccacagtccaatggtcagccttgataacaagccacctgtactttctttttatcatggagtccatgatgtaaaaattgatgacactttcttgcttctggtgtgcttcctttcttcttcattttccataagtagtttcctccatcccacctcccaacaggccacagtcaattcaggacattttaaccatgaaaatgagtctccataacacgaatttagaggccagacagagtggatcacgccagcaatcccagcattctgtgaggctgaagtgggggaatggcttgagcttaggagcttcagaccagcctgggcaacatggtgaaaccctgtctctaaaataaataaataaataaataaaaataagccatgtatggtggtgcatgctactagtcccagctactcaggaggctgaggtgggaggattgtggggccaaggaggtcaagtatggagtgggccaagatcatgccactgcaatgcagcctgggtaatggagtgagaccttatagcaagaaaaagaaaaagatttaaaggacaggctgactgtcttgttacaagccaatgctcatttgttattccataaatcctagggcacctcttaagaattatgctaaatctacactacccctgctctataaatggaacaacaacacttggatgatatcagagctgtttactgcatgggttactgagtattttaatctcactgttgagacctacagctcagaaaaaaagattcacttcaaatacttcagctttttgacaatgtacctggtgactaaagagttctaatggagatgtacagggaaacacatgctggtttcatgcctgccaacacaacatctattctgtagtccatggattgaggcatcattttgactttcaagtcttattatttgagaaatatattcgtccagggaacgaatctcctcacaacatacctaagaaagagatatatgtacagaaaacgaagcacagtaaaatatcacttcattactatcggagattttccccaaacacagagaaagctctacagagctgagcttaagccagaactctgttatttacatggtctaatgccaaaacaggccagagacccctttcacctacttctctttaatcccaaacccatgtctcgctttgatctaagaaagagccaaatgcccaggaggtgccagggtagagaaaagcagccagccagagagtggcctccatgccaggggagtgtgtctgagctttgttttatttttcttatttgtctgtagttgtgtgattggtagaagagagtagatatgaagtctactgacacaggattggtcctcaggcatgtcttatcaagcatttgggggaacagaagggttccacaaataagagagcaatgatcagactttcttctaaaaggagcagccacaagctaccttaactctccaacttgcccattaatcttcacctagagttaggaagatttcaccattatctgtggcccataaaagatccttaagcttgaccaaccacagaggtccatctccttgaggaggaagtgaaaggggtatggacagaagctgtgagctttctgtcctccgcaggcccccagctgtatcttctacttcttgtacaagattgtctccaaatgatgttttctggctgacaatgccacagaactgatccttatctcactatggaaatgaaagatttcgaagaatttgttgcctgaaatatggtgccctaatcacatattaataaagctgctatccagaaagaaggcagatttcaaaagaaaggctgttagcatcctcagggacctaaaaagtacatattgtagaacaatggtaaatagatcttggaatcaggtagactttaattcaaatcccagctatgccacttattaacttatgtgacatagggaaagcctctcaaatttagatttgcaaaatcagaataatataagtagccaacaaatagggtttaatggagttaataatgaaggtgattaagatgataaaattaaatagtgaatataaagtgcttagcatttaataaatttattgtatgatttcaaagcacatgcttttacctacagtgctataaagctgcttgcgatagtcaaagctaatagaagctcttgtcagagctaatagaagccttgtatatgtaattatttaagaattctgtaaatataaacaatagggtaggaatgagaaaatctttagaggaaatattcaagtatatttgatttctagcaaatccagatagacagttttggcaacaaccaagtcataatttgaagtcttgttataggagctagaattttattcaagggacaactgatttgattagattagatgctgtgcactgcactttgggatgtaatttgattttgatgaggttggagttcccacaatggggttagcatcctaataagaagagcagaagactagagccctcttctctcagccatgtgaagatacaacaagaacacctgcaaaccagtaagagggccttcaccagacactggctctgctggtccagattttaatcattgaattcccacaactgtgagaaacaagtatatgctgtttaagccactcagtctacagttgtttgtagcagcagcctgagcagacaaagacatagggctccttttattttcagaattcagtttagctgtaatcacctaccatcctgagatgctgtttcttccctcctcccttgaaatataagctctgggactatagcttcatggacaaattctgaagaatttgtctctgctcttgtgggatgctaacctaaccaaccaaagaatgtttgctcaatggaatgaaacatcttaatgcagctcaccagccaatatctgcagagcacacctcatgggttctggctggcttggatttctgagactacttcatcctactcatcagactgtggactcagattcagccaggaggcccagattctagcgtcagttttgcccttgggatacaaatgcacgtcctgcttcactgaacatgaaacctgaatatttggccattactctggcaattgtcctctctccctgtgccaattgccaatcaacccaactcccaggcagccttggcagttatgtctgcttggcctgctgtagcagccaatgacttagtaaaagtcagaacatagatctgctagctcccagtccaggatttccccataactcgtccatgtatatattaaacaactaggcttgcttttaaaattctttttcatttagccttttcttagaacttatcattttgagaatcctgacctgccaatattccataacctttctgaaagtgacaaagcaaatacgatgcatgcacactgctaactgcagctgatttcattttccatcatctataaagcacataaggtaatttctaaaccagcagtaagatctatttataaagaatgccgatttgttttctgcattttccaacacaaagcttcaatttatttccttaccataaaaaaacattactttttaaaacaatcatagttagtatattttataaatgttttaatttttgtaaagtccaacttgcaaattggagtgtaaatagctttcttaaaatggaaggaactgtgttagacccactatgctgattgatgattttactgtgcttcaaagcagacgatttcacagtcattgggtatataatgtaatgagtttttataaagcaattcatatcattaaaaatataattataataaataaaattatagggaaaaggaaatcttcattctgacaatgccaattttttaactaactcattgctaaaagattatgtttctacatgaaaaattttacacattctttctatgaaataaacctgataacaccttgaaaacttaatagttatgggaaaggaactactgtgatttattttagagaatgtcgtgttcttgatgttctcaagtgagcggtctcatgttattagaagggaaacagcagtaccttgtggacaaaaaaagaaagtgaatgaatttttaggacccggtgcagtggttcaggcctgtaatcccagcactttgggacacctgggcggagggtaacttgagcctaagagttcaagaccagcctggacaacacagtgacacgccgatctttaccaaaaattgaaaaattctctgggcttagtggctcataactcaggagccagctacttggaaggctgaggtgggaggattgcttaagcccagtaggtccaggctgcagtgagtgtgatcataccactgcattccagcctgggtgacacagcaagaccctatttcaaaaaaattatatttatgtagcactttctacaaggaatatagtatcatgtttgtatttaaatgacatcaggaccagcatggtggcttacacctgtaatctcagctcctcagatgacggaaggcaggaggatcacttgaggccaagagtcggaaaaccagcctgggcagcataatgaaacccccatttctacaaaaatgataatagtaatcaaaagctaggcgtgctggcacacacctgcagacctagctactgtggaggctgagtggaaggatcactttgagcccaggagtttgattgtattgtgtattgtgagctacgctcgagccactccactccagacaacacggcaagacccagtctctaaacaaaatacagggacatcagagcattatttatagagatttataaatgatcccaaaatgtcttcagggagataaatcatctaaatatagctatatcgactcttcctaaattccaaatttgggtgggaaaaataaatgagatagaagacttcttgaaatgtatcaagactcaggaagacaaaacaaaaactttcattaggcagtatcaagaatgttcattaatgctgtttctaatttatgatacggtcatctaaagaggaaatcccagcaacaagaggccaaaggaaagggaaaagaaatgaaaacaaggaccatactttctccacatccaacctcttttctaccacctctcagcaagacctcccacagccaatcactgctttctcttgcggacttaccctctactctatgaacacatgagccagagaaccctgagaagtccctgagtcccttccaggggctctgcaagggcaaaagtcttttcataaaaatacacaggttttgtttaccttttccactttcattctctcacaagtataattggagtttcccagctacctgacgtgggatgtcacaagaaattaaacatagaagcagaaaggagaaccaagtcttcttctattaaaccagacattaaagacatacctaaaaatataaaacaatgtcactgttctcaccaactttactgcttaaaaatgataattttaagtaaaaatgtgatttacgtaaacatataagtatattatttttttaatttctcagttttaatgtttaatatgataaatatagatagacataatccaaataaataaaagctctttggggtcctcaataactcttaaaaatgttaagtgttcctgaaaccaaaaagtttacggactgatgcgctaaagctcataccctttgatgtagcttccacccaggtcatttcttaaatacttgatcaaccatttcccatgtccctcaccctatccttgttgcaaaattccattttcctactgcagccctccctgtcatgagaaagttcccaggttgtagacatgatttactaaatctttcttaacagctttatcataataacatgacatatacaaattgtataaatttaaggtaacttaatgttttgatatttctatactttttgaaaggatcaccatgatcaagcaaattagcatattatctctacatatttaccattgtgtgtgtgttgacagtaattaatttatgatctagtcctttagcagaacacaagaatatgatacagtgtagttccatgttgtgcattatatctccagaaattattataacttgaacattgcacaatttaattaacatcaccccatttcccctccctgagctcctggcaaccactgtcctagtctccgtttttaagaatttgactgttgtagattccacatgtaagtaagatcatgaagtagttgtctctgtgtcttgcatttttgcttggcgcaatatcttccagctccatccatgttttcacaaatagaaggatttccttcttttttaaggttgtataatatttcattttatgtatacacatcacattttctttacccattcatctgttcctctgccaaaggacatttaggttattttcatattttggtcattgtgtgtcatgctgcaatgaacgggatgacagacacctctctaagactcttatgtcaatttcactggacatatatccaaaagtgaaattgttggattatgtggtagttctttttttttatttttgaaatcgttcccactctgtcatccagggtaaagtccagtggcaatatcatagctcattgcagccttgaactcctgggctcaagcgatcctcctacctcagcctcctgagtagctgggactacaggtgtacaacaccatatcgggctaattttaattttttttctgagatggggtcttgctatgttacctaggctggtctggagctcctggcctcctgccttggcttccccaaatcctgggattacaggtgtgagccatcacaccaggccagtgctattttccattttttttggaggaacctcgatactgttttctgtgttttactaatttgcattcccatcaatagtgtttaatggtttccttttctccacattcttaccaacacttatctcttctctttttgataatagccattttaacaggtgtgacatgatatctcattgtggttttgatttgcattactctgaagtttagagatgttgagcacattttcttatacctgttagccatttgaatttcttctttggagatgtatttatttaggttctttgccttaaaataaaattaggttatttataattttggaattgatgtgtgtgtgtccttcttattttttgaactccttataagagatatggtttacaaacattttccccatttcataggtggccttatcatttcactagttgttttccttgctgtgcagaagctttttagttcgatgtaattcatttatctattttgcctttgttgcctgtgcttttggaatcatatctaaacaaattattgccaagaccaatgtcaagaatgttttctcctgtcttcttccaggagttttgtggtttcagtgattacatttaaacgtttgatccactttgagttaatttttacataaggcgtgagctagggatccgatttcattctgttacatgtagacatccagctttcctaacaccatttggtcaagagcatatcctctgcctatagtgtctccttgtcaccttccagggtgatcaatggttgcaaatgtgtgggttatgcctaggttctctattttgtttcactggtttatgtgtctgtttttatgccagtaccacagtgtttttctttctacagctttgtaatttaatttgaaatcaggaactgtgatacctgtagctctgttcttgctcaaaatagcttcagccactcagggatttttgtgattctatatgaattttaggatcatttttttctatttctgtgagagtaccattgggattttgatatggattacattaaatgtgtagattgctttgagtaatatggacactttaataatacagtactaactctttcaatccatgggttgtctttcaatttactttggtttaaatttctgtcatcaatcttttataatttgtactgtttaagtctttcacttctttggtcagttagttccaaagtagtttatttgacactgttttttaaatttccctttcagacaattcattgttagtgtttagaaatagcaatgatttttgtatgtcaattgtgtatcctacaactttagtatatttattatatagtcagtccttcatatcaatgggttctgcaaccattaactcaatcaaccatgaacctaacttgtacatattttccatctgtggtgttttgaatccacagatgtggacccatggatacatagggtcaactgtacacaattttatatgagggagttgatcatcacagattttgttatctgagggggtcctgaaacaaatccccagcagatatgaaagactgactgtattatttctaaccattttctgtggagtctttagagttttaatgtataataatcctgtcttctgttaacagaggtaactatatccttcctttcaattttgatgccttttttttctcttgcctgattgctctggctaggacttccagtactatgttgaataggagtgatgagagtagacatccttgtcttgttccagatagtaaagaaaaagctttcagtttttccccattgattataatattagatataggtttttcatatacagcctttatagtgttgaggtaagtttcttgtatacttattttgttgagagttttatcatgaaagtatattgaattttgtcaaatgtgttttctgcatctattggaatgttatttttatcttttgttctgttaatgtggtatatcacattattaatttttacacattgaaacatccttgtatcccatacataaattccaattggtcatggtgtatgaccttttcaatgtgcttttgaattcagtttgctagtttgtattttattgagaatttttgcatctatattcattaaggatactggtctgtaattattttttattgtgttgtcttcgtctagcttttaagtcatggtaacatcggcctcatgaaatgagtttgagagtattctctcttctattttttctgaagagtttaagaagttttggtgttagttctttttgaatgtttggtagaagttgcccatgaaagcgtctgcacctgggcttttctttgttgggaaatttttgattactgattaaatctctttgcttgcttttggtctgttctatttcttttttgttccaccttggtagattgcatctttctaagaatttatccatttcttctaggttatccaatttattgtcatataattgcttaattgtcctttataatcatttgtattcctgcacatttgttatgatgtctccattttcatttctgattatatttacttgagtttctctttttttcttagtgtagctaagggtttgttatttttgtttgtatttccaaaaattcaactctagttttcttgatttttctattgttttttattttatagttattttatttatattctaatctttattatttacttcattatgctaactttgggtttagttagtttttctttttctaattgtttatttgcaaagttaggttgttcgagtgagatctttcttattttttaatgtaggtatttatcactgtaacatttccctcttagcacttcttttgctgcatcctgtaagttttgttgagttgtatgttcatttttgtttgtctcaagatatttttaaaattcccttttgatttcttcttttacccaatggttgttcaagagtgtgttgtttagtttctgcatttttgtaaatgtttctgttttctttgttattgaattctaattttattccattgtggtctgagaagatacttggcattatatcaaacttcttaaatttgtaggatgccttgtgacctaagatttgatctatctcagagaatattctgtgttcacttgagaagaatatatattctgctgctgttggatggaaagttctgtatatgtcagtgtttaatctactgtgttgttcaagtcagctgtttcctctttttttttattcctgcctagatgttctatccattattgaatttggggtactgtagttgcctactattattttagtgttactgatttctccccttatctttgttgatattaactttgtatatttaggtgttctaatgttgggtggatatatatttacaatcttcccattgaagtgaacttttatcattatataatgaccttcttagtctctagtggcagtttttgatttcaagtctattttttctgatctaaatatagatacccttgctcttttttggttaccatttgcatagagtatcttttcccatcccttcactttgagcctctatatatctttatatctaaattgactcccttataaatatgtactgatgagtatcttttatgcattgtgccactctatgtcttttaattagatagtttaatcctttcacatttaaagtcattgttgataggtaaggagtaacttgcattttgttaattgtttttcatatgttttgcagttctttttttttttttcctctcttgctgtcttcttagtttggttatttcttgtagtggtttggtttcatttatttttcttcacattttgtgtatctcctataagtttttaatttgtggttgcaaatttacatcttctataaaaagctgtcttaatgttatcagcttttttggaatcattttctttctcttccttcttcagatatatttgcaaatactctgttgttcaagacacgagtaaatagggctctggctagaaatttatcaatacaaaaaaaaagatcctctgagtcttttgataagttggaaaataatgatagactgtggtagaatgtcatgtatttcaagttctgtcatctatgttactctgcaatatattttctgtgtgtattagtcaatgttatatatttataaggtaaatccataaagcatacattctagaatgccctaacttaggtccttaagagatatgctccttatagccttcttggcactcctgaagtgttaaatatttccattgaagaaggttgcatatggtttctgagatgaagtctagacaggttaggattattttttgctccttttgcctacacagcacccactgtcccctccctttgttattagccattatctgataccctagatgaagccaccttctgtccttcagttttcgcgtgggggctgatttcacccccagtttcaggaataagcacaggacagctactaacaagtatgttgttcactcaaggaagaaacccagctaagggagaaaggggggttgaaatccagcctgcatgttcttctccaagccacatgcaccgatacaaggttgcatctaactggagaaaggggagccattttctaatacttgcaaagcactgtgtggacagtggaaaccctgtatgagctcgtgacacaggcctggccaatgaatagacttctaatcctggcacagatgaaactagagatggacatgaaatccaagcctcacacccaaagtcaatctctagtctcttattgaaactattagaagtgtttctgtttttgctttattctggggctatggaactaaggaaatgtaaactggaggagtgatgatggccacattgcagcacaaagggaaaacttgtctgagaataaaatcaatggggaaggaaaaagcaaggaagaggagaggagccaagtcctgagtccctgcgttcagccattctgaagctataccctggatttttccattatacgagtccacaaattaatatatattttttggcttagaccagtttgagtttgaattctattatttataaccaaaggagtcctaccatattatcttagccagattttcataaacacggtatacgttgatgaacaaacttcctaaatgtttcaagttcactccaaagagtgaggggaaaaaagaaagaagaggaagaaaatggttacttatcatccacagtagtcaagggagctgcagaagcatcaagcaaaagcagcagaagttagctttgtactcccacaaaccctgctctgaagtactccacctagtggcccacagaagaagctgcatttctaaaatctttaaaaagacagaaaaggaatcaccacttaccctgggaaccctaacaggggagaaggccatgtaggaatatgtcccattggtttgaggtcgataagtccattttcaaagctttagtaattccagaaacaagaacatatttattttgctttgatcacacaatgcctagttatattaaaagtaaggagacattcaataaataccttttatggaaataaaaacagacaatttaggagaaaaataagtatcaatgcattattttcaaaggtaaagaaaaaagaaattattctgaacacacaaaactatattatcaaatatcatggtaaattatcattatatactaggtcacttaataaatttccagagatgattggaaagagtttccacaatagattttgtttcaccccaggaagaagtttcacaaaaagttagttacttatctccgttgttactagtaccaaactaatcctatcattctgagtcaaattacaaataacgtccacacttttctccaatgagatcacaggagatgcctcagtggagtgtgttttaatgtaagggcataattggtttatatttttcactaaaaataaattctagacaacttaagcaaaacaggaattcaatgaaaggatattgaatagttcacaaaatcattgaagatgctgaagaagcaaggtaagaactgagggaaactcagcacagccaagttcattcgacggaaggagatcttgggatgccaccactaggatgttgtcatttgacacttgtcaccctgtagctgggctctgctgaacctaggcacttgctgccacattcctggacgtgcatctctgctcaatttctcagaatcatctctgattctttcaggtcttttgcatcatttcatcgggttccaagttctaataaagagacatcagttggctgggcctagatatgtgcccacacgtgggtggccaagaaactggaaaaaggatcatgcactccctttcagcttttgtaatggaaggtggggcctgtcctcatattttgcttggggttcaaaaaactaggaagggggttttgttgaaatgaaacccaaaactatagctatccatttacagcaccttatttgtacaggaagaaaccatgagacaaaatgtataaaagtgcatgggaggtctaaacatatgagggggtttctgaggacagaaagatcatacttgattggtgctgtggtttcactgtgcctcctccgagattcagcgttgataatttgatagtgttgaggtggtgcctacaggaagtgatgaggccatcaggactcctacctcaggaatgggtttaggagccctcatgaaagggctccatggagggagttcatccctcttgctctcctgccttccaccatgtgaggacacagtgttccttgtctctggaagatgcagcatcaagacaccatcttgaacggagagaacagcccttaccagacatcagacctgccaacgccttgatcttggacttcctagtctccagaactatgacagataaacgtccgcttttcataaattgcctagtctgtgttattttgttgtaagagcataaattgactaagacaattggtgattagaaaaagttttttgaagtggcatttgagaagggcttgatagataagatctctacaaatagaaatagagagatggtttcaaatcacccaggtgaaaggaataacatagccatgttcagtctgaatgcaaaatggagatggtaaaaagtacataggattccaccaccagtggcaggacagaattgtaatgtggcagcaatctgtaaatataatatttatcactcattcacatttatttagagtctaatgtgttctaggctcagaaattaagcaaagaaaacctagatatgcataagtccaagactttgcctttgtgacagtcaaaataatgaccccataaagatgttcttgtccgtggaatctgtgaccatattactttacatggggcaaaagggactttggagatgtgattaacccttgagttagggggattatccttgattatcttgggggccaatctaattacctgcgtctataaaatcagagaatctttcctagctacagtcagaatgtgatatgactacagaaccatggtcacagacatcccacattactggctttgaagatggagtgatggtcccatgatccaaagaatagggacagcatctaaaagtttgaaaaggaaatggattctctctagagcctccagaaagcaatacagccctgacaacaccttgacttaagcccagtaagaccacagtcagaggtttgccctacagaactatagggtcataagactttgatttaagccacaaagttgtggtaaattgttatggcagaaatagataattaattttaagaactttattatttggaagataggcagaccggaaaatccaaattataatataattcgattaaaacctatggagatttgggctaggtgttttagaaaagaattgagtattaacaagactaacagaagaaatgttctaaaataggtacacactaagtacatcacatttttctaatgatcacgttgatagagcaacttagaatccatggttttaacaaaccaacaggcttatatacatatatatgaaaatattatatatatatatatataaaatatatgatatatggaatagccccatgggcacgggcagccctgggtcaaagggcgacactgtactagcagcccacaccccaactcacccgcctaccctgagctgacttgtctgctaaatgctaaataaacctgtcaacctgtctggtttaacttagaagggcctggatgcaacaagcctgagggctgtgactgggggaaaagagagtacagatggagctcctcctccttctgtcactgcccaccaactgaaaaccaccaaatgaagtttgcttagattctcagcccacaccttgttcccaacaaaactcatacaatgctttggcccccactacaatctctggaacaaaatattctacggatctgctgtttgagctgcaacttatcttactaaattccaagaagcttatgtaaaagaaaacctccagataatacaggattttcaaggtgatcatcattgctacttttaactagaaattatccagtaaaagtattgtgaattgctttgtgactatggtgatttatttagtctttctgatccttggtttgattatctcaaatatatgagtatcaccaattttataaagttgctctaaaaattaaatgaaagaaaaataatcctccttctccatatattgaacacttacaaaattataggcattgtgtccaggtttttacatacttacctgatagaagtctcctaacagccctctcttttaaattacaagcattttgccatgatttttacatgtactttatggaagcctcgtaacaatcacatcttttatagatcagcaaactgaggctcagacgagttaaaaacacattcaccatcaaatcataacaagggatgcaactgggattcaaatctggttctctctgatgccaaaaattgtgcaatttaacgggaaccaagttacacccagaacatggagggatcaaaacatgtggattcccttttctgccccctcatgtgggaatttcaatagctttcactgcctcagagcaatcctaaactccctcccaggttgcttgcaatggcccgcttattcgtggggatgattaggaatctgcatttttggaccacaagcatctataaagagttgtgttgatcaagaaataaaattttctaggccataggttactgtgaattgtctaccttctctgcaaaaaataaaggggctattccatgtaaaaaaatcacaggatccactgaatctgtgcagagagacttagaactatactgcaggagcatcttactgacagctgcgcctgaagaccagccgaaacacacaaagcaagagcacctccaatgaccaggtgtggtggctcttgcctgtcatcccagcagtgtgggaggccaaggttggtgaatcacttgaggccaggggtttaagaccagcttgggcaacacagtgagaccttgtccctacaaaaaaaaaatcattttttattattagaatcaagaagagtacctctaaccccttgccgttgctttagggtagagagctctggtctagaactcaagatgtgaaactgtgagtcccagtgtagctacttaagtttaaatacaagagctgtcagacacttcttctacagcaacgaaatctgtagcatccattttgtactttaaaaacttagtttttggcaagcctctaggaagaagaagagggcccagaactgggcatatgggtagggaggggaaaagaaaccggatggatgaaacagggaaagacgaagtgatgaagacgccaggcagagccagtcctcatgcttggggcctgggcctaggaaaggaaataggtgaagaagggaggagccccaggctgtggatgtctctgggggaaacttggttcagcaacagccagaggagctcctgaagccaagaggtatctgtcgcctccctacctttgggcgtcttctggtcaccaatgtgctgcaggtcatggctccggaataaaattgagctcaagttgtgagagctccaacgccgtggagcctggcgctactcccacctccacttcgtggatctcagagctgcaggatggctctgcccaccgcaccctaagctggcctcgcttggggctggcattgggggacagcatgttctgggcatctctgctcctttctgctggtgcctgtgcctttgctggccacccactcatagatatcagagccacaggacggccccgcagaaaccctgcgctggccctgccgggggctggctttggcacatgcgaccggtcatcatggtccccatggggcacctctgctcttctcgaggcagcttgggccttctcttgcccccacgtctgcagagctgagcacctgccgcctctccccaggaaaggcaaccaaatgccaccaacttaagccacccactgaaggccaccaactaaaggccggttgccctgccaacgagatcgtgtcctgcttaggaagaaccaatcaggccttgagttccctccacgcgctgcccttccatttgtcacgtgggagtccaggcactggctcacaaagccgtgccccccagagaccccgccccacctttcatttattggtagctggtagcaactttcaggtttcctcactgtgaattatgaatatgaattatgatgaaattactgtatcctaatgtacctcatgcactatctgacagccatagtcccctcttcccccatggcctctgagttttttggaaactagaaagaagatacatttctgcaggtgctttcagaaaaaaacattgccacgatctaagtttactctgtgatgtcaagtcatatttcatatgtcatacatattcatatttatattcataattcaaaatgtacatattcaataaaattaacaggactaaaaaggaaattttctaaaatttatacactaagtatattatatttttctaatgatcactttgatagagcaaacttagaatctatggtttcaacaaatgaagaggcttatgcaagagaaaaccaccacctaacacaagattttcaatgtgatcatcattgctacttttcactagcaattatccagttaatatattgtgaactgctttgtgactatggtgatttatttaaacctactgatcctttgattatctcaaaaatatgaataataccaattttataaacttgttctaaaaattaaatgagagaaaaataatcctccttctctatatattgaaaacctacaaaattagtaacattgtgtccagatttttacacacttaccttattgaagcctcatcacaaccccgtcttttaaattacagggattattcccagatttttaaacacttaccttatgcaagtctcataacaatcccatcttttatagatgagcaaactgaggcgcagacgagttataaacgcattcaccatcaaatcacaatgagtgatggaactgggattcaaatccagttctctctgacaccaaagtggtgcaatgtaatgaagaccaacttatatccagcacatggagggatcaaaacatgtggattccctttctctactctcttacatgtgaatctcaatgggtttcactgcctcagaacagtcctaaattccctcccaggttgccttgcagaggatcccttcttttgggggacgattaggaatccgcatttttagaccacaggcatctataaagagttgtgttgatcaagaaataaaattgtctaggccatgagttcctgtgaattgtctagcttctctgaaaaaaataaatgggctattctctttattttttgttattccactattgacaatagcctagaatcaacctaaatgtccaaaaagacttggtttaatcctgaggattactaatgttttcactgtggtcattgtggtagattatattaccattctcccattatctggtcttcctactgcagtggccctatttcctagaagattatacatttctgtcctattgaaggaagggtcagattaagacatgtgacctgtttggccagtgaaatgcaggtagaagtggcatgtgtaacttgtaagcagaaaatttcctttttcaaggatctggtagccatccctttcaaatgtaatcctccagaaggataataccttatttcccagtctccaggagagagtaagagcctaatcttgctccaagttgtaaaaattaccttatatcataaagataaaagaaagtttatttttcctttgagaaaagacagttagcaaagacaggtggcctatgatcgccctcttaccctcactttcaaaaactccacggccctttgtatcaggggagctgagttcagactaggtctggcctctctcccgtattgcaatagcttgaataatatcttccttacttatttaactttttccagtacatttttttctttgactctttcctccgtctctaaaacttacattgaaattttagtaggattcaaggcagccaatatcgacccttgaatatacaaaagaacgctttaagattaaaaaacccatgttatcttccataagttatttctttggactattgccttattaaaagtttctagttcttatttttgcattgaaaaggagaatgatgatttttaaataagttcctactcacttttaatttctattatcacagttttattgcttttcatgacaatacattcttcgcatgcctcatagtaaccaaaaggcaaacatttttattagatacactaaaaataaaagaacaagaaacaaaaacacacagagaaaatcacttaactacaaaggaagacaacaaagggacaaaaaggtacaaaaattctaaaagacaccaagaaaacagtatatggcagtacaggtccttatctatcaataattaccttgaatgtacatagattaaattatccagtaagaagacagataatgggtaaatggattaaaaacaagacctaactatattctttctacaagagactcccatcacctgtaaatacacacataaattgaaagtgatcagatggaaaaatatattttatgacaatggaaatcaaaagaatgcagaagtagttatatttatatcaaataaaatagacttcaagtaaaaaaactgtaaagacagacaaacaaggccattatgtaataataaaggggtcagtagaacaagagaatacaataattgtaaatatataatgcactcaacattggagaacctaaatatataaagcaaacattaatagatctaaaaggagagacaaaaaactgtacaataatagtaagaaacctcgatatcccattttcagcaatgaacagatcattgagagagaatctcaacaaagaaacatttaaactgcactctagatcaaaagaacttaacagttatttacataacatttcatccaacaattgcataattcagtgtcttttcacctgcatatggaatattgtccatgatagatatgttagagcacaaaacaagtcttaactaatcaaaaaatcaaaccatatcatgtgttttttttgaccatatggaataaagctagacataaacaacaggaggaacttcagaaattgtgcaaatacatacaaattaagcaacatatccctaaacaaccaatgggtcaatgaaaaaaaatttaattttaaaacgtcttaagacaaataaaaatgaaatcagaacatatgaaaacttatgaaatacagcaaaacagttcttagagggaagtttatagcaatacattttgacatcaataaagaagaaagataatgaataaaacatctaacaatgtatttcaaggaactataaaatcaagaacaaactaagacccaaattagcaaaagaatataaagatgagagcacaaatatacaaaataaagacaaaaaatacaaacgactaattaaatgaaggaatcttttttgaaaacgtaaaattgacaaatgttttgtcagactaagaaaaaaagagaaaattcacataaaatcagagatgaaaaaggatatactatgatagactctagagaaatataaggaatagtgagtaagtactacaaacaattatacgccaataaattgaaaagcttagaagaaatacgtatgctctggacacatataacccatcaaaattgaagaaagaagtagaaaatgtgaacacaccaatgacaaataatgagatggaaggagcgatttaggctctcattcaaggaaaatccaaaagacttcacacagtagctcacatctgtaatctcacagtttaggagcccaaggcaggagaatcactagaggccaggagttcaagattagcctgggcaacacaacgagactccgtctctaaaaatacaaataaaaattccccaggtatagtggtgtgtacttgtactcaggagactgaggcaggaggatcacttaagaccaggagtttgaggctgcagtcagctatgactgcaccactgtatgccagcctcagtgatagagtgagactctgtctctaaaaaaatagaggaagaaagaaaagttcacgacttggtggtttttgctgacaaattctacaaaacatttaaaaaatttatacaaattatttacaaactatttcaaaaaaatgaaaaggagggaactcttccaaagtcattctatgaagacagcatttcctgattccaaaatgagacaagaacagcaaataaaagaaaactccaggccaatatcattgataaacatagatggaaacattcaaaaccagcagatctagcaatgataattcaaaagcacattaaaaagattattcaccataatcaagtggtatttacccggggaggtaaggatagtctaatacatgtaaatcaataaaatgtgatacatcacattaaacaaagaaggataaaaaacatataatcatttcaatagatgcagaaaaagcatttgacaaaattagacatccttttatgatcaaaccttttaacaaattagttataaaagaacataataaaataaagaccatatgtgataacccacaggcaacattatactgaatggtgaaaacttgaaagctttgcctctaggatctggaacaagacaaggatgttcactttaatcacttttttcaacatagtactggaagtcctagtcataacaattaggtaacagaaagaaataaaaggcatgcaaatggaaaaaaagtcaaattgtccctctttgtagatgacatgatcatatatgtaaaaaaccctaaatacaccactgagaatcagaaatagtaaatgaatacaataaggtttcaggatacaaaagctacataaaaaatcagtaacatctctatacaccaatagcagactatctgaaaaaggaatcaagaaaataattccacttaaaatagctattaaaaaaacaaaatacctaccagtaaattaagccacagaaagatgaaaataattaaacattgataaaagcaatttaaaaaattaaaataaatagaaagatatcccatgttcatggactagaagaattaatattgttgaaattaccatactactcaaatcaatctataaatccaatataatctctatcaaatttccaatttcattcttcacagatattaaaaaatatcttaaaatccatgtgaaactacaaaacaccccaaatagccaaataaatcttaagcaaaaagagcaatgctagaggtattacactatctaatttcaaaatatattacaaagctaccctaactaaaacagcatggtattggcataaaaacaggcatgtagaccagtggaacaaaaatagagagcccaggcataaatccacatatttacatgcaacttatttttgacaaaggtgcaaacattcaattgggaaagacagtcttttcaacaaatggtgctgggaaatgtgcatacccacatacaaaagaatgaaagtagacccctatctctcatcatatacaaaaatcaactcaaaataaattaaatatttaaatgtaagaccccaaactatgaaactagtagaagaaaacataagtgaaatgttatatgtcattgatctgggcaacgactttttagaaaagacatcaaaagacaggcacaacaaaagcaaaaataaacaaatgagattacaccaaataaaaacttctgcactgcataggaaacaatcatgacagtgaagagacaacctacaaaacaggagaaaatatctgcaaactattcacttcataaggggttaatatcccaaatttatagaaaactcaaacaactcaatagcaaaaatacaaataattggattagaaaagtcaagacagttgaatagacatttctccaaataagacaaaaaaatcgccaacaggtatatgaaaaaatgctcaccatcactaataatcagagaaatggaagtcaaatccacagtgagatatcatctcaccctgcttagaatgctttttatgaaaaagtcaaaaaataacaaatgctggcaaggatgtgaagaaagggcaatgttcatacactgttggtggaaatgtaaattagagcaattgttatggaaaacaataaaacttccaaaaacattaaaaatagacttatcacataatccagcaatcccactactgggtatatattcaaagaatattaaatcagtatgtcaaagagatttctggactctcatgtttattacagcactattcacaatagcctagaatcaacctaagtgtccatcaatgaatgaatggagaaagaaaatgtggcatatatgctgtatttggtcattcttgcattgcaagaataaagaaatacctgagattggataatttataagaaaagagacgtaattggctcctggtcccatgggctgtacagggagcataatgccaacatctgcttgactagtcaggaagcttgggaactcgttcactatcatgaggatagcaccaaaccatgagggatccacctccatgacccaaacaccccctaccagaccccatctctaacagtggggattacaatataacatgagatatgggtcaggacaaatatccaaactatatcatatgcacatttggccataataaacggtaaaatcatgtcacttgtgacaacacgaatgagcatagacgacattgtggtaagtgaaataagctaaccacggtaagacaaatatcacatgatctcatttatatgtgaaatctaaaaacactgatctaatagagagtagaagagtggttaccagactgggaaagatagggaggagaggttttaataatgtgtcaagtatcaaaataccacattgtaccccatcaacatgtgaaattatcatgtatccacttaataaaagaaaagaaaaaagaaaatggaagagtcaagatactgaggcactggaagagatagaagagaaggtgaattggcagtaaggaagagagagtctgaaagagcaggtcacagagtggaacattaaagtttataacattagaaatcaatttttaagttattgaaaagttaagtttatagtcatgaaagtgagtagctcaattgaagcgaaagtaaaagtcaatgaaagattaaattagaaaatatattgcttggcatttagtagttacttcagaaatactaataaatcttaagaaaattaagaacaccaaagcattcatagtggaccattatcataatacgaatttatgtggtaatattttattctttccagtgaagggagtaattcaacagccttgactacaggttagaaaatgatttctccaggtgtgacccactgaccacattcattgtatttgaattgcttgagcaatttgtttcaggagaaaatggaaagattttaagatggaccaacgaaattaccactgagtgtctttaatggaaacctcagccttgtctagaataacctgagttatctgtttctatggagtctctgtgccttttgttttctttgttatttgcaattctgttagttgtagattactgatagtaatgcaaatattcatgtttatagacaggcaaatgattgattttggtggaagtataattaattttcctttttccaccttccatcaagaagtcagttttgaacctatcaagcaaatttatttcagtgttccttagtgcctagatatgtgtggctcttttaattttccataaaactcagtataacatcttactggctccctcattaaacaaatgagttaaacaaaaatcttagacaagtgttcattttatatttgtaagtcataatttaacctattttaagcaattttcctttatcattcctaaaaatacagattcctatgccccatgctagacctattgaatcaaaatctcaggcctaaggcacaagaatttacattgttagtaagcttttcaagtgatttttaggcatactaaattgtattaaccattaccattctaattctttaaacttgaattattgtatttataattccatcttcatcaaagtaaacttttggttagcaaaaacggtagaaacccccttattcaatcagattgggaccagtaataaacagattaatcacaaatttaagttagatggaggaatcataagaagtattagatgtaagtccttaaaatttaactttaatttaaaagacatgtgtaaataaatttgccagaatttcgatgacaaggtcaaagccttgcacggattcagagtggagtttcttgtggaaactatgccaatgatatgttgtcattgatttcttgttcactttctgtgaagacaactggggtaaggcaatctgaaatcctagattacacaatttttcccatttgtttctagttgtcttgccaacagttaagctgacagcaactgtttgagtttctcatttttccaacacatttagtttatttctcagagaaacaatactactcttgttatactcattttctcagtttacgtaatatttatttatttatttatttatttatttatttatttatttatttattttgagacggagtctcgctctgtcacccaggctggagtgcagtagtgcgatctttgctcactgcaagctccgcctcccgggttcatgccattctcctgcctcaacctccccagaagctgggcgtacaggcacccgccaccacgcacagctaatttttttgtattttcagtagagacggggtttcaccgagttagccaggatggctcgatctcctgacctagtgatccgcccgtctcagcctctcaacatcatatttaattaaattgcataactacaagaacaagaacaaatggcgtaaacatatttaggaatgaacacagcttcctcttagaaaatatacaatttctgtgatggaaggagaaatgtacaggcattaaaagcagctcaaaggctttcagtttgcagtggacatcagtcaataagttgtacacgggtacaagaaagtgctgattgtaaatcagttaagtggaggtcagttaaggcagcatccactgtatcttaatttgtaaagttaatgttctaaaactgggttcacttttgctataaaggaccagaaaatgtggtcctaaatgaaaaaaaaaaggacctaaaatgaaaaatattttaggctttgcaaaccatacggtctctatagcaaccattcaactctaccattgtagcaggaaagcaccatagatccatggatgtgctccaataaaactttattaaaacaggcagctggtctgagggccatgtatatatcttgctgttttcatgcaattttctaagttagtagttccctgcctttttaacaatcaaggattacttttaatcctctcctctgattttatgtttcaaaagccttaagaaaaaccctaaaaatatatttattttgtaattttgggggggttcttattttactaataagtaatcaatgatatataaaggctacccattatgtcagtatgaaataatcaacattattaactctaatgacttagttctggatagaaataagaagtattcaactatatgtatataacttaaaacctgtatagttttttctggtgtaaatatataacttttcgagattcttcaagtattaaatacaacttttgggaatcctcacacctggctccctatgatgacatttaagaattccttaggattctgggaatcttagaatgaaagtcactgctctgtaggaatgaatgaatgaatgaataagaaagggaaggaagaagaaagagcatgtctactaaatgtaaattaatcatcaaggaacgtttattttattaataaatttgtcaactttaggttgccaaatctaacaagagaccaacatggcattcatggtgatcacacctctagtcaaattttattttagttcattgactatactattaatatcctgaaatactcaaaaattctgtcttaattctgtgaataattcacttattaatcaccctatacttaatgaacggaatggtgttggaataaagataattacagggctaaaagggttttctctagaggcaggttataggatttttttgtctgactggaataaaacaaaattaatcaatattttctgcaaccagtggcttttgacttagtcatctattaatatctatcaatcactataacctcagtcctgtttcctccattcttctttttgctatcataaaaactggtccatttttttcctgttagatctatatgtttctcctcttttcttttcatccaaataactggtcatcaacttagtagagatagtgcaattgatccgaaccctacagaactcagtgtttcaatgtacataacttacataactgtcaagctgaaatcactctcaaatttttttaattcaaaattttaatttcatttaatcatatttatttattcattaatttattttgaaaataattttaacttgtattttacattcaggggtacgtgtgccagtttgttacatgggtatatctcatattgctgagttttggggtatgaatgatcccatcatccagatgctgatttggtatggtttgactctgtgtccccacaaaaatctcatgttgaattgtaattcccaatgtagggggaatgacctggtgggaggtgattagctcatgagggcagatttcccccttgctgttcttagatggtaagtgagttctcatgagatctgatggtttaaacatatggcacatcccccctggctcacttgctctcctgccaccatggtagaacgtgccttgcttcccacttcaccttctgccatgattataagtttcctgaagcctcccagccatgcttcctgtacagcctgtggaactgtgagtcagttaaacctcttttctttataaattacccagcctcaggtagttctatatagcagtgtgagaacagattaatacatgagcatagtacccaatagttagtttgtcaaaccttgccttcctccttctcccctctagtagtcctggtgtttattctgtccatctttatgtccatgagtacccagtgtttagctcccacttataagtgagatcatgtggtatttcgttttgtattcctgcattaatttacttaggataatggccttcagctgcatccatgttgcttcaaaggacatgattttgttatttttatggctgcatagtattccatggtgtgtgaaatggtttggaaggtggcccctataaatctcatggtgaaatgtaatcctcagtgttggaggtggggcctggtaggaggtgtttgggtcatgggggtggatctctcatggcctgatgctgtccttgtgatagtgaattctttcaagatctggttgtttaagggtgtgtggtacttacccccactcccattctctcttgctactgctctggccatgtgatgtacttactccctcttggccttccatcatgagtaaaagctccctggagactacacaggcaccatgcagatgctgtcaccatgcttcctgtacagcctgcagagctatgagccaattaaacctcttttccttataaattacccagtctcaggtatttcttcatagcaatgcaagaatggcctaataatactaatgtggatgtaccacattttattgatccaatccactgttgatgggcacctaggctgactccatgtctttgctattgtgaatagtgctgcgatgaacatgcaagtgcgtatgtgtttttggtagaataactgactttctttgggtcatataccagtaatggaattattggcttgaaaggaatttctattttaaattatctgagaaatttccaaactgctttcaacagtggttgaactaatttacattcgctccaattatgtgtaaatattcccttttctccacagcctcccaagatctgttgttttttgattttttaatagtagctattctgactggtgtaggatggtatctcattttggttttgatctgcatttctctgatgattagtgatgttaagcctaatctttgctaccagaaaactgggaaaacacagtgtcgcttgtcaaaataaattgttttactttgctttaaaaataatcaatttagtagtatatttcttccagaaaaattaagaagtaaacatttagaaatgtacagtaccttgctgttaagtcttcgcacaagtataccaatcgaacataaaggccactttaaactttcatttgaaatgaaagacaatttttaagaggttaagggctagtaatttgttaaagtcctgaagttaagttagctgaagtaaatataaagactttcctttaattaaagccttttaaatgaacactttaaagcatagttggtttctccctcaaatcttgtccaaagacactgtttacaactcagtatatcaaaggtttcagacatgattatgaagctccctcaacttacaatgtgctatttgcaaccttagttgctatcattctggcttttctaccttttggcaacaataagcacacccttcccatttctcccccaccctgacttacccctctttgcatttaatgtataatttttctcagaatgttcttacacatctttaactgtaaatatgacaaaagcacacagtatagtacatgtgccacatgtataaatgttgtatctattcatacaattttccttttaaaaaagaaatattttattttcaaaaagcaaagactctaggaatcttttctagctgccagtcataaaaacataaatttctggttagattccaaaatttgcctgaccataagaaacacttgtggtacttgtcaaacacatgtattctgagtcccatccgtgatctcctgaatcagaatcagcaggtgagaagcctgggaatacacattttaaacaaacgtccacagtgattatgattagtcaagcttgaaaaaaatttcactaggatctttatgactgaataacctcacaaacataggaaagttactggagaaaaatacgagcagaatttcagaattctgcctttgctgaaagtgtttgttccctcctcctctactcatcaagacctgactgcttatgtaactcccccaaaccaccaacacctgggaggagttgaaaatgattttaatgaagaagaaaagctgatgtttaatttcaaaactgacggtgacaatagaagggagaggcatgaatttatcttgattctaacacgaagcattgtatttcagtcaacaaacgaaattggtttcatttttattttttgtaagttttcgccaaactctatgcatatatagaggctgggcaagaaagaaatccagaaatatggcatatgccatcccttatttatttccccatgcgaccagccaacagcttcttcacctagtccctgcttcaagctgactttgtgtctacttctctatcggaaatggagcttccctaaagactgcctcaatgtcagttacccagaggccttttttccatcttgtgctcctaaacttctatgatattaaatgatattaccctttctggaaattctccttagctttgattttataattttactctaactgtttaattccttcttttatagcctttcttttctctatccctttactgcagacatgttgtacggctttgttcttgaccttctgatctctccacattcattccctcagagcatgtatccattttcttggtgtcggccttcctgactatctgattattaccatcatataacgatgttggtgatgagcatagctaacatatcctaggcattttccatgtaggttataataagcactctatataatttgtaccatttaattcttcaaccctaaatgatactattacgaaccacattgtatgagatgaggaaactgagattttcatcaaaaccatggaaagccaacgtgaggagcccctgtgtgtctcctttgttaatgcctctgggcatcatggcatgtggattgccctagaatggggattaggaagcgcagcactgtgaaaacaccagaaaatacgttatgatagcgggtaaggacgctcatctccgcacattgagatggttttatttctgagtcaggtttgaaatgagccaatcctgactccatggtgccaccagggatcacgaatttaataagatctttgtggatgcttggaacccaactggtctctgttttctactttagggaaagagccacagcttgagtggggtggttttggtgtcacatacgctatcaataatacccaccgttttggtgtcacatgtgcgattaataatacccaccgctgcagagggatcaccgtggactactcctcgtttcatcccatgctcttgcgatggatccctctcacctgtttaatgatttcattcaaattcttcagcgaccgcaggaccccgatttgccttctctatcctggttcccatcactctgctttacaggcctggcctgctcgcggctcctcacaccagcactgcgcatctccctccacgcctctgccctgtttcctccatcagacaggactagcttcctccatctctatcgggcaaaagcctgcccagcgttcaagaccctcctcagatgccgcctccaggattaggcttcttcctgacccctgagcctgtaacacgcgccaccataactctccacctccgcccacattcccacagcactcgcgacatccgcgggcctcaacatgtctcttcattccattttagggtatttcctgtttgtttcctgcacacacagtcgcgcgaggcacagccctgagtgacctgcgcgggagtggcccgcgcttcaagatgcgccgccgcaggccggggagggcagcctgagccgcttcccgcccccgcggggaccgtcgccagcccgcatctctagcgagaggaggttccacagcgcgcccggcagccccgccaccgtcagcacctgcgcctcgggcgggctttccccacctctgggaggcacgaatcctcaggggctcctcgagagggcgccagggagcagatgcatgcggacacctttcggccctctgcagccgccgtagctcctccctcacgccccgccccccccccccctcccggcagaaacctggaagtggaaatctcgggcattcaccgtttgggtgaagacggaggcgggttctggacagacgtaggctgtcagggagtgtttacttcgcctccacttctgttcctccctgccctggtgctgctccaggtcacatactcgtcctgagccggcttcagcctgtccgcgcagaagtctcccggagccatggcctagtactcttatgtgaagtctagcaagctcgtgctcaagggaaccgaggtgaagagctgggtcctgcagctctggtgggagcctcctcagttcttttcggatgcactccacccccgcgaatccggtggaagccgtggtgcagagagccggctttgtggcctcccaggcttcgctctgaccctgtctgggctggacggaggccggaccgcggttcctggcgcctgtgcagagaggggcagcctcccgtgctgacgaccctggaaacaggatagacgggcgggtgacccgtggccccgtacccacgagtttgggtcccctgaggcatctctccaggcctctgcctggtgggtctgcgttagtctgatcttgtagttcattataataacttcctttattagggattattcttttctccattgtctcttcctggaaaaattattgattaatttttttctaagctaatatgtagagtgaaaccgggatgaatcacacagtggttgaggtgtatatgggctttgatagggatatgggttggaacctgcactctgtcatttactaattttgtaatttgtggcaaattggttaatatgtctgaacttccatttactcattaagagatcaagtatctttgaacctccgtttacacatttaaacttttagaccattttttatacctttagaatactgtgaggattaaatgagagaacatacatgcagtaaataaattaagccaaatgtgaggaggaggtcgtagtggtaatttattagctctttaggagaaaaatacctgtgcattcatatccccgcttcttttttaactggcagatttgcctgaggttgactgtacatacaaatattgagcatttcctcctggcctccgtgataaacaggggttttgatattgttaggcgagatggaaagaaagtatcaaggagtgagctgaagccactgcccttgagaaccctctcgaggagtctggcctcatgaagatgccagaataagtggcaggtatatcctgaatgaatgtgagatttttactatgtgaaatgcctgtgaggagtggtgagttatcttctgaaaactttatgatgaaaatgcagacaagagtgtcttaagattatcgtaataatcataattaatgcttatatagcactttcaatgcgccaagaaattgttgtaggcactttgcacattaactttcttcaaattgctcttgggtttttatttttttattgcgatgtaattcataattataaaattcacccttttgtacagtcagtggtttttattatatattcaagaggttcaccactgtctagttgctcagcattttcatcatctcagaaggaaatctcttcctaaccattaaagcagtcacatcccatcttccccctctcctagtccttggcaaccactagtctgctatctatgtgaaattgcctattctgaatatttcctaagaaatcatgcaacatgtggccttttgtatctggcttctttcacttataacattcttgaggtccatcagttttgtagcacttgttcctttttatggctgcgtagtagtccattgtatggatgtaatattttgttcatccattcatcagttgatgaacatttagattgtttcccctttttgactattgtgactaatactagtgtgaatattcttatgtaagtatttttgtgggtgtatgttttcatttcccttgggtatacatacttaggagtaaaattgctgggtcatatggtaactctttaactttttgaggaacgccaaactgtttcctgtagatgctgcaccattttacatttccaccagcaatgtgtgaagatacatattacctcttaatcctcacaatagccttaagagttaagttgttatcctaattttttaagtggggaaactgactcacagagagattcagtaccttttcccaaaatcacagagctaagaagtgacagaatcaggatttaaaatctggcagtgtggctctacaatctgctttgaactttaacataatatgtacaaagcctgaagcaaattctcagtactgtatttaagagggcatagcaatgtaagtcttcctaaatcaataatttataaatgaaacaacttaaaagacttccaagtttcaatcttacgatattgatttatcacacaaatcaatatacttaaactcatctatataaattatgtcctgtagtaagaagaaaaagagcaaagataagaagagaaaaagagaagatgaagaaacccagcttgatacgttggtgagtcagttttcagtgctttattctgaaaaaagttaacatttcttgagatctcattgaaaatattttcctagttagaaatttatgatgtattcatatttgtcttaaagtgcttaaatattacctacagttgcaaattccatttattctttagcacagtagatgctactgatgcctttacttcattatcagaacagagcacaggagagaagaattacaactctctgacttagtaggcaccattagactgcttaataatagctggagattctgatacataattttaaaggcttaatgtaaatgttattcaaccaaatatattttacaagctattttctttgaacatgtatacattttagttgtagaagtcagttgtctcttaaacaaagtatcttcataggaaaaatcattattttgtgaactctgaaatgaatgaaaattttaaatacaatatcagggtagcctgtaaatgatactggaaataaactgacccaaacacacttaaccagcctgttttccgtttagctgtttccatactttttttttctcttttaaaacttggcaagttgcattttgaatcttcataaattatggtagcttaaaaaatatataaaatatggaatggtgtaaagctaatgttctggaagaatcattgcttttgaaatggcaaatcaacaattctaaaattagggtaaatatctagggtagatatgtagatgtggaattgctgtgtcaaaggataggtgaatgtttaactatataagaaactgtcaaaatttttcaaaagtggttgcgctattttatcctccttttcagtttcttaatggtggtttttggatggacagcttttttcttttttttttttttgagatggagtctggctctgtcacccaggctggagggcagtggcgcgatctcggttcactgcaagctccacctcccaggttcacgccattctcctgccttagcttcccaagtagctgggactacaggcacctgccaccacgcccagctaattttttgtgtttttagtagtgacagggtttcaccatgttagccaggatggtcagaagcttttaatgtttataaagctttgtttattttttttcttttatggttactgccttatctctttgatctaagagatctttgcttaccccaaagtctggaaaatattctacattgtcttttagaggcatcatagttttagtttttacattaaatctgtcattaatctcaaattaatttttggcatggtgtgagtttggttccaagatttccttttttttttttttttaacatcttgatagccatttgtgccagcgccactggtgtttcctttttccattaatccagttttgtatcttcataaaaagtcaattaactttctatgtattggtctatttctggactctgttctatcgattttctgtttttcttttggcatatttatcttgattgttataatttcatgaagtcttgagatcaggtagtgtgtgtcctccaactttgtacttactattagtttattgatttcttcagtgaagcctgttggattttctcggagaattgtattgagtccagagcatttgggggagaatcaacatcttaatattgggcctcaatatttcataattttcaatgtagcagtcttgcatgcgtgtttaaaaatttattcttaagtattttataattttacactactatcagtagaacttttgaacttgattttccagttgtttgttgtcagtatgtagatatacaattgatttttgtatagtgactttgtagtctgataagtctgtttcacttattacttctagtggtttgtttatatagaaaactaagaaatttgcaattatgtttcctgtgactatcgttttacttctttctttctaatccttatgtcttgtcttgctttttattggtttattatactgtccaggacttccatagtgttgaacagaagtcacgagaatgggcataattgcattgtttccaagcttaggcagaaagctttcagtagtccaccatatggtatgatgtctgtatgatctgcagagaaaacctttatcaaaatgaggacattccttttaaactttgtttcttggcagtttttatcataacgatgtttaatgctgtcaaatgtctctttctgtatctgttgagatgattatacaaatttcttcattctgccaatgaattacattggtttcattttcaacttttaaactaactttacatccctgagataaaccccacttggttgtggtgtgttgtcctttgggatattgctagatttgatttctaggtgtttttttttcttttcttttttttttttttttaagatttctatattggtgttgatgggagatattggactttgtatccttttcttgtaatgtctttatttgattttggtgtcaaggttttattgggtgtcataaaattagatgggaagtgctgtctccttccctgtttttggaaatagctgtgtaagatcggtatgatttcttctttacatgtttgataggatttaccagtgaaatcatctgaacctagagggttttatttggtttggttttagttttttgtgggagaattaagattttttaagagatattttcagatttttctgttgtcagttttggtaatttgtgtcttttaggaaaatttcatttcatccaagttgttggatttattggcataaaatttttcagaatattcctttaatatccttttactgtctgtagaatctaatctgtattgcagtctcttcatattggtaatttgtgttttttctgttttttcctggatcagtcagtctagctggaggtttatcaattctttataagatcacttattttagatcattaatgatcttttagtacaggggtattcaatcttttagcttccctgggccacaatggaaggagaagaattgttttgggccacacatagaatacactaacgataagctgatgagtcaaaaaaaaaaaaaaggaaaaaaatctcataatgtttcaagaaagtttatgaatttgtgttgggctgcattcaaacctggcctgggccacatgcagccctcaggatggacaagcctgtttcagtattacttattttctatttttttcattttttatttcatttattttcagtctttattttcctccctttaacttattttcagtttactttgctcttgttttattgcttcttaagaagagagttagatctcttcattccacattagttttagttatagtcaacacattttgctttcattttcattccattcaaaatatcatctagttttccttgtgagttttcttttcatggacacttgagttatttaaaagtgtattgttttttaatttctactacatagagatattataagtatgttattgttgctgatttctaattcatttatagtatagttggagaacatactttcttagtgaatttccatgtacacttgacaagaatgtgtattctgcagatgttggttcagggttttttttttttttggagatgaagtcgctctctgttgcccagcaggctggagtgcagtggcacaatctcggctcactgcagcctccgcctcccaggttcaagtgattctcctgcctcagcctctggaggagctggaattacaggcacctgccaccatgcctggctaattttttttatatttttaatagagacggagtttcaccacgttggccaagctggtctcaaactcctgacctcaggcgatccacccgcctcggcctcccaaagtgttgggattacgggcgtgagccgtggcgcccagtggttcagtgttctttagatgtcagttagatcaactggtggagcttgtggctatgcacatcttctgtgtccttactgattttttactcatcctacaatgtattgagagttatgttaaaatctccagctctacttgagcagtttttgcttaaagtattttgaagctgtcatgtgtacacacttaggattgttaagtcttccttataaattcagtctttcattttcataacattttaacctttatttctgttaaatgtcttgatgcctagttaaattatttgaccacccttttgctcctgtcaagcctgggcctttgttagtttgtgcttatttattagatttttacctgcagacttagacagtgactcttactctaggagatgttcatcctcatgggcctcagccatatgttctaggtatacttgatgagttctctccactctgctatgtcccaaatttgtgtgatctctggcatctccagtcagccctcagaagtgccagccactctgcagaggccttgtggagcctgcctgctgtatgcactccccccagcccttggccccagacctgcagagaacttttgcattctcttttgaggcctcacctgtatgtagttccctcttctccagtaccttattctataaactccaaacatgttagcactgcaagactctcagcttagtgacagtgacattgcctcatttttggaggtctctacctctctctgtgtggtcaagaaactgccattgggcagaaaacagaagtgtgtgtgagatttgcctcctgtgttttcctgttctcaaatatcacagtcctgttctgcctgtgttccaatccctgaaaagagttttctcaaatattctatccagtttcagttttctcattggtcatggtgggagggcaagtccatcttggctggaagaggaagtccttcttcatctttttctctttgtccttccaccttcttttgcattgtggattttctaaacttgccgtataagtaagcatgtgcctatttgtgaagggaaagaaaaaacccttttaattttttaaagctgttctgttggttcctcacaaggatctgaagggattggtaaataggatgaaagaaattctgtctttcacatggagaataccatgtgtgacattaataaaaatgagcatgtctgtaagcaaagagtttcactgagctctgctagattcagaagctattgaacttacaacatcgtagtttgcaaaacacagatttgatttactcaggaactgaagctaagtaagctatgtgttaatagaaagtctgtgaagggtacttagactacagtaagattggggaagaaaattccatttccaaatctaagatatatcattcctttttgccaagcacataatgaaggtagagatttaagggggcccttagcacagaagcactgggttagtcagaaggtgacgtgagctgtcacacagccttgattctagaatgagggtgccctggtagtatcttatcagccatgacactggtacatcgggccagtttttttttttttttttttttttttgagacaggctcttgctttgttgctcaggctggagtgcagtgacgtgatcatggctcattgcaccctcgaccttgtaggctcaagcaattctctcacctcggactcccgagtagctgggaccacagtcttataccaccatacccagctaatttcttaatttttttgtagagatgggggtctccttttgttgcctaggctgatcttgaactcctgggcttaagtgattctcctgcttccacctctcaaagtgctgggttacaggcatgccagatatatggaagcattctcaactatgtgaaaatatgtgaaaagctttgttatgcattgtgagacaacacagtgggaatatttcatcatctgcctaaggtttaaaaggaaataactttaagcatgtgtctaaatagcaagtaatgttttagagcggattctcttaaattcagcttgggcgtctgcagcatatacacagcttgagctgtaacctgacatagagacaggcaacttcagtgcccactgttcctaggatccacggctttttcacacctaaaacccctgagtggcactgttaagtattatgttatgttactttagtcattaaacgtataagcatacctccaaaggttgaatgtaggccacttgcagaaagtaggcagaatgctcacatttaattcttgatgatactgtgtttagctttcttattctttgaaatatcattgagaagaaatactggcatctgctcaaagtaatttctttttcagttgacaatattataagtaatgttattgtatcatttccctacttggacagagtgtgaaaattttgaggattgtctgccacaaatttcttcttcatttgcaaaacattcatgagatattatatttaaatgattttatttaatattaagtgtacttggtgaaggtggcatagaaaatacaaaataaaactaatttaaaaatattaactattacatttataagaaagacttgctaatcataacactgttcataatgattctgaataaagcattatttcttttactgaaaacaattgtagctataactcaatcatctaaattgtcattagttttatttctttctaatcgcctctagctgaaattttaattttgattaattttctttttctccattggtttcgtgtgtgtgtggaggtaaaatatacagaatgtagaatttgttagtttttctatttttacgtttacacttcagtggcatttaaatacatgcaccattttaccttcccaccagcgttgcacaaggtttcagtttctccacatcctgcccaacatttgtttttctggttttcttggtttctgttttttgtttgttttgataatagcattctaatgggtgtgaagtggtattgcattatggttttgatttatatttccctaatgactagtgatgttgagcatcttttccagtgcttattggccatttgtatatcatctttggagcaatgtccgtgtatatcctttgcccagttttgaattgtatttgtctttttggagttctctatatagtctggatattaactccttatcatgtatgtagtttacaaatattttctccattctctgggttgccttttactgtgttgacagtggttcttgatgcacaaaactttttaattctgatgaagtccagtttgtctatgttttcttttgttgcctgtgcctttgatgttctatataagaaatcattgccaaattcattgtcgtgaagcttttcccattttcttctaaaagttttctaactttagctcttacgtttaggtctttggtctattttagttactttttgtatttggtgttagataagggtccaacttcattttagctgaaattttatatattttaaaattgattatgaaaagcatgaaatgtttagttgaatagaaaattttgtgcagtggaattaactgaatctttaaaacctttttattatggaaatatccaaactaatccatacatagaagaatataatgagtcccccatgtgcccaggccccagcattaattatcaatattttgccaatctcgtttcatttacatacacacccccacacacattttttcctagaaaattctaagtaaaatcacagatattatgtcattttacccataagtacataaatgtacatttcttaacttggtatgtctttctctcatcacctgttttgtcctttacttttatgcattatactatgtcattatcagaccttgtaaaattaacaagaattccttaatatttcatatccagttaatgattgactcatttctactctagttaaagtacaatttaggaggaggtttgaggatattttttaacattaagatataaacttttataacaactgctaaaataattgttgctaaagtctaacatttctattggcaaattggaaattagtatacatagacatagattctgctcattttgctttcaatctaaaatcgtagttaagattactggccgggcgcggtggctcacatctgtaatcccagcactttgggaggcagaggcaggtggatcacgagatcaggagttcaagaccagcctggccaatgtggtgaaactccgtctctactaaaaatacaaaaaaaattattcgggcatggtggcaggctcttgtaaccccagctactctggaagctgaggcagagaattgtttaaatccaggaggtggaggtcgcagtgagccaagatcgcgtcactgcactccagcctgggcgacagagcgagactccgtctcaaaaaaaaaaaaaagattactatgctagaaagtcttcctgagagacatttttaagaagtattatgataggcattgcctctggaaagcaggcatgaatagatggctagggtctatcatgagagagaccgttctccatatatcactttgtaccttcacatgttgccttttgttttgttttggtctttttttgaaacaggaccttgctctgtcactcaggctatagtgcagtggcgtgatcatagctcactataaccttgaactcctgggctcaagtgatcctctttcacagctccccgagtagctgggattacaggcatgcacccccatgcctggctgtatgttgctattttgtattttaaaaacctaatcctgactgtgctggtagttgcatgaatctgtgtacacacatgcgaacaagtacatgtaaaactggtgaaatctgaataagcttcatggattatatcaatgtcagtttcctgattctaacaatgtatgatacttatgcaagatgtcatcattgagacaaagtaagtaaaggatatgtgagatcttcatattatttcttacaactgcaagataaaaggtttttaaaactaagttataataacaactctgtgtcaaaactaaaatataaagttgaaatatcaattttattttttaggaatctggtgaacagtaacaaactttggtgaaatttcaggaaccatagccattgaaatggatgagggaacctatatacatgcactcgacaatggtctttttaccctgggagctccacacaaagaaggtttgtgtctggaagggaagatcctgccacaagtgtagattttaggacattcattcacttaggccaaactctaactagtatcaaacattttccaaaggaatgtaaccattgcatttgactcttccattttttttaattccttaatatttaccagccattggcaagtccctctttctaatataagcatttgaaaacattccgtatagttccagaagagtatctttggaaatctaaacaatatgaataattaaaatagtaagtggaaagaaaaaagaaaacctatttcagtcaaacatgtttgaatttcttttttattcagacttattaccaaaactaacctgggtgcatttaacaatttgaagtttcctcgttttctttagcccattagaggaagcactaatgagatacgaagtaattagaagataaaaagcagtatcatttggtcagcaaggccatccattgaataaatgaaagcatttagcttttttaaataagtgcttacttatgactgtattttaaaacataaagagaagctatctctaaagttattaaataagcattatatcaccctgtcttactcagtgtataaaattagcactgtagttaaaagaaggtaaaatagatcttgattccaaagatacagtattacagtgacatcagtatatctgaatattcttacatttaattgcagaagaaaatagccacattttttaaagcaaaataatgtctttatatttatagcaaatgtcaaatttattttcaaatgttttttctccaatattgatgagggccctagtcctccagagcagtttatggctgtcaaattatctgattccaggtgagcttatgttgtaatataattagtaaccagttattttaaaaatttaattgtattcattaaaaattttagtgtctgtcttaaggccatggtaattttgatataaaaaatgaaatagcttttttgaaaagtagattttgtgatctacttttagtggatttcctatcaatatataatgctaggctggaaaaaagatatgtaaattaaaaaatgaagattaataatttcacacaccaagtaagatagattaaaaaataaatcaaatagtacaaaacctggttcactgttgctatgatatttaaactcactgtttggaagtctaaagacaaacaggaagactaaaaaaagggacattgttgaaaccagcagagaatgttacagcatcataacaaccaaaagaatatttttactcactatttttacagtcattttataaagtaaccttttttattctcaccttgtgcagaaatatagaatgattctttgggtaaaagatactgaaagtgaatttacatactttagtaattggttacatcaacatgataatgatttctgttatataatcattaacgtataaaggagtaaaagtcaattatggcatccgaggagattcttagtaaggtaaaagaaatcataattttaaaaaatcacattaagatgattatttctatactttctttgaaattctgataagtagggtgaaagacagaataaaagcagaggaagaaaaattcaatagttttaaactgctttacaattataaacaaaaaaagattatacagaaaattaactgacaaatgaggaaaatatttgcaacaatcttaataggcagtgagttcttactcttcatatgtatcttgtatagaattcatagcactgaagaccccagtagagaaattgtgaacaatcagatctgaatagaaaaatggacaagggacattaccagataatctaaaagctagaaaggaaaagaaaaacaattgttattctagttaactactaaaatgcaaattaataggatactgttttttttccatatcaggttttcaagtatttttttagagtcataatgtttaaaaaaaatccatgatacaaaacatactctattaatttgaggtaagaatgtaaatggaagcagcattttctggaaaacagtttgatgacataaagttttagtaatttattattgaaggttataactaaagaggtataattgaagaatgatgaattttgaaaatatttgttatgtaatatataaggtacaatgtttatattaaaaaagcaaaataaaaaactaaatttaaaactttactgtccaatatggcaacaactagtcacatgtagcttttttttttttgaaggcacagagtctctgtcacccaggctggagggcagtggtgtgatcatagctcactataacctcaaatttctgggctcaagcactcctcctgcgtcagcctcccaagtagctggtattacatgtgcacaccaccatgcccagctaactttttaaattttttgtaaagatggggtctcactatgttgtccaggctgatcttgaacttcttgcctcaagcaattctcccattgccttcccaaagcacagaggttacaggagtgagtcaccactcagccacatgcatcttttgaacacttggaatatgtccagtctgaaactttagatatgtacacacccacacacatacacatgtcctgttttgatgtcctataattaattttctctccgtttttaacttttatctatcttattaatgtacagaatcgccctgaaatctggctatggaaaatatcttggtataaattcagatgaacttgttgggcattcagatgcaattggaccaagagaacaatgggaaccagtctttcaaaatgtaagtgctgttattgtttataaaaacttcctgtcagtttaacagaaagtctgtaacagtcaatcataatatatttaaaaagaaaaagtaggatgcaatagtataatacattaaattggaataaaccactaagaacatagagccttaaagagatctcaaaatatagtgcaacaaaaatagcattagtacttttgtccacaattatttctgtatacccttagtgcctagatatggatctcatttccattgaagaaccagtcaattttaggtcacagagtaggaaaacagaatagttcctaagtatcttctttttagcagaaatcatggatgttttcagaaacattacaggccgtaagcgaacagtggagctagctaagaccaagttgtgacaatttgcgtataaaatataaataataatagttcattgaagtaaattatctctaaaagactttcagttcataagcttaaaatagtgtacgaaaagatagttttaatataagaagaaaaaagttaatgtactaattctttattttattaagtagacagttgtagtatatggatgttttgttaaatctttgttgatacagaatacataatttcctttttctgtttgtgtgagaagtaaagattgaacaaaaatatgtgagtgctaaactgtctttaaaaagtagataactatatcaaaaacagtaaggaccagtgggcaccacgcagaacaagcaaatagaagataagctcagcctttgagtagcagctttggtagtatacaataatgaactgaaaataggaactcagcagtgttttctaagatgacagattaaacaaacatcccaccagaaagaggtaatcacttagactaatttcctcatcccctaggataaaatcttaagtcagtgacttgaaaactattttgacccaatccattgagaaatgcatttttacattgccagcccagcacaaacatatgtataactggagcaagagttgtacttaacaatacatacttatccatgtgttatgcaccttgatattttgtattctcttttaccccttcctctgtgtgtctgtgtgtattcctttcccccccaacccacccaataccgttcaggaaacattacattgatttcattacctgctaatgtgttgcaacccctttgagatgatcctactagttatgatgagatgcttctaataaaagttacaccagtagaaaatgccaatatttcataaggccaggatgatcgcttagatagtactaataatacaacactttaggaaagttcatttcattttatttttaggaaggacactaagtttcaaaaatttaaatttaaatgaaagagggtcttaaaactgtattgcgaaaaggactcagctgaataatctgtggcacaggtttaaatcgccttggaccacaccgccatgttccagggctcaccaggagccatccagatgagagaccacccagcccttgtgacttgactaagaaattaaatccatgttatcagcacatttttaactggatgtgatataaggttaacatattttgtaatcattgtatttataaatattttgtctaaatgttatggtattccaagttttccaaaagaatcaaccaaatacaagttataaataaacgttatatttgttacgggagttaagctaaccaaatttataacccagatttaaatacacaagaaaatcaggttttacagttttgtttaatagaaaccagtgtaatacatcaaacattaaacaactaaaaatgtatatgaatatttattttcacacacaaaagtccctcagacattgattcttaaattcaaaacaccaaaggcattgtatgtaccttttcatgttttctaattgtgaagaaaataaattttacttaaaatgttaatatctgaataaagtatgcattcataattatgttcttgtctttaaagttaattttccaagcagaactaaatcagttttatcttcagtagatcttttagaaaggaagcaatcctactaggaagatacactacaaatgtttattgtggtaatctttgaatagtaaaatgaaaggtgattttggtttccttttctatatgttcttgtattatatttttgaggtttttctctcagttcttttctgtgacttttaaatcagggaggaaaaattaattcagtctaagcacttaatgtttcttccacaagaagtatcctcatggctattttgttattttgtttcacttaggggaaaatggctttgttggcctcaaatagctgctttattagatgcaatgaagcaggggacatagaagcaaaaagtaaaacagcaggagaagaagaaatgatcaaggtaatgatgccattttatacagatgactgaattcacacatgcgatgtgactgtatctctttaaaatgttaagtcatcatttactgtcactttaaagattcagttaatagctttttataatgtggtgtttcaaatagactcatttttaattataaatcccatagttgatggcttgtttatacaatgtggtagagaaatcagtgcatctaggagctaccttgccattatctccatggattagtatctttttctggtagttccacatgctctttttaagcttccattttcttgttttcttgcgtgtattttaaaatctaattttttaaatagataacatgtacatgtggtccaacatttttaaataaaagcatatgaagatgaagatatatgcctgccatgcatcttactcacctgtgtcccagctccggttcctctttccctttgtttttttttttatagcctcctaaaatttctttataaacatatgaatatatttataattttcaactgttttacactaaaggcaaccttctctatagtcttctcgactttgatttttttttccttaaaattgtatcttggagagttttctactattagtttgaatgtagaaagttttctctttttcttgcttttcctctctttctctctctctcttttttaacagccacataatattccattttagggatgtaccttaatttatttagtcttttgtagatggaaatttaggttgtttccagtcttttgctcttctaaatagtgctgcagtacataacattgaatatgcatcaatttgtagatgtgcgggtggacctgcagataaatttccagaagcagaattaccaggtcggggtatacgtgtttgtatttacataatgcttgagcttctgtgatgataatcactctatgaaacattaaaaatcatagcagaactgctggctccttagcccttacattttaaaaatatttttattaatagtacccatcttctttgcattaggagaaacatgaatcacataaaacatgatttttattttatttttaaaatttgtgtgcatcactaagctggaaataaaagttccttattccaggctaaattccctcatccgtagtcagatgcattatccattgcaccagtggcctgtgccctccctaatcctactctttgttttacatcattgtaaaagttacacagacatcttcatatcaaggtgaaattctaaataatactgttaatataacctagataggtagttaactggaatttgatgaaaacatttaaggcttaattttttagactcacaaaagccactgatctttaatgataaacatataccaggatgtgtctaaagaataactcccgccttcttgacacatggcttttctgtgtcttggcatttcatcgcagtactgagcatcctgaaccttgctttgtttgtctctgttgggaatcacaggttgcatccagtctgacccagatttgctctgtaaggcattgtgggggccagagtggaaggctctaagagagggggcaaatgccttttctaaaatgcccttcgttcttataattagagcataaaaatttatgttacatttttctctactaccagtgtaatttaaaagcatctatcaattctctgtatgtgcttcatgttagatttctggtcatatgtttgattttcttcttagaatagtcttgatttcagataatttcaaatctaaagctcaaacaatttcaatttaaaatgtaggcattttcttacagttagagaagtgaaatgttatacttttcgttgcatgcatccggcacatgcgcacatgcgttatagtcttgaatttccataatgatcctgtgaggtggatgtgagctcagccttacagacaggaagacagcctctgaccctccttacatcctcgtggtttttgtcagtcacttcatggaaatcacagtgatttcaaggtgtggtaggacaggatgtgtacccaggcccagctgactccagaggccactctcagtatttcatagcacattgcttctcaagaaacaggtcattgaggaaatgcagatgggtttgtgacttacatttaattttacttatttatattttattgtatcatgtgtaaattatttttcatctggatatcatcacaaaagtgttattgaaggcaacaattgcaaatatatgtgcagtgctttgcacttatacaaagatacaaagatacttacacaaagattgcgtttttcactatttaaagaaattttcagatgaaataccaagttttctgggtctctttggttagtcaagtacttggaagctctgaacagtgattatttaggacacttttcgtaccatttaattgcaagctctcctaatctctgtcagcccttcatctttatgaccttgccttgtctaccagaacacacatccctcttactaaaggtagcattgtgctacaggccctagcagggaatgttttcaggtctgggacccctctaatcaaaactgtcacaaagatgtcattggcacaaacgcgttatttgtcatcactgtctaagcagccctggaactggactctggccacagagatcccttaggagacatgagtccttaccattgccaattgcctgttctgtgggcgatcctaatcgttgaatgcagaacaattaatttatgacatgtgatagtaagcatctgtccaaacttaggaggatataagaagctagtaaaagaggtgggttccaattaattaaaaacaagttgtgtaatgttaaaagttttaatactttggtaatagtctgtgcaatgtaaaatagctattaagctttcaatctgatcaaatgaacacttgtctactagggataatttgatcctagtgtattcacttggaggacaaagttaaattaactaatgattgctttattgcctagcaggatctgatgtgtaaaatgtttctgaaataattttgtctgtagtgtttctgacacaagggctgcggaggaagcatgtgacagcacttactcatatagattatatatatgaagtaaaaacacatagccagaacctgtctttttctgattatagttgctcagttaattttttcttctgcataagaaatcatcttgaatgttcttatgtgacacataaagtggggaaggtggaagataaacatataacccattggattctcttttccaatatctagattagatcctgtgctgaaaaagaaaccaagaaaaaagatgacattccagaagaagacaaaggaaatgtaaaacaatgtgaaatcaattatgtgtatgtatgcttttccttttagacctacagatttgacagtgaagtgcttctcaaagtgctttcaaaataaattacctaattagctggggatggtgttgcatgcctgtaggcccagctactcaggaggctgagacaggaggattgtttgagcccaggagttcaaggctgcagtgacctctgatcaccactgtattccagcctgggtgacagagcaagaccgtgtctgaaaaaatgaaaactgatagacaagaagaggcaacacaatgtagcctctaggacagagcactgagctaaatgcttttcttgaggtttcaggtttcctaatcatcctaccagctcccaaagctagtcacttgggttagtcaatctctctattcattcatagaatgggcgtgatgccagtcaaaggctgtgctatggtcaggacagaggggactccagccagcatgccctaatagaagtggggccttctgctacccagtcaatgagtggccctcctcttgagaggtcatgaaggtcatctttgttgttcaaaagctccagcttattaaaaaaatacaattagactttttttttctcccccaagacagagtctcactctgtcccccagactggagtgcagtgccactatctcggctcattgcaacctctgcctcccaggttcatgtgattctcctgcctcagcctcccgagtagctgggactacaggcacgcgccactacgctcggctaatttttgtatttttagtagagacggggtttcaccatgttggccaggctgttctcaaactcctgacctcgagtgatctgcctgccttggcctcccaaagtgctgggattgcaggcatgagccactgcacctggcctacagttagacttttttaataagtgaaaaaagaaattaacagtatttataaatttaatagtaaatatgtgtaatcagagtttgaggtatttttcaatgaagacattttctttgcagaaagaaatttcagagcttccaagaccacaaacttaaaataagtaaagaagagagtaaaattcttaaaaaggctcagaaagatggatttttgcatgagacgcttctggacaggtagctatttatttacttattttcactattttcagtagctaatagaaatggcatgtagaaaacctatattctcttaaattactgtagttttcacatttttgtctttatttataatttatgagtgtggcaatattacctagagaggacatcatgagtttgggaaaagactgtcaagaaagaatatctaaaaattataaccgattataagtatatactttaagaaattcaggtttgactgtatctacttcataaatttatcattatctttttataactattagaaccagagttagaaagaagcagtttgactaatataaaaattctgtggattctgttagagtagttcatgttccttaaaataagcatagatcaactaaaaaactaagtataaaagctaaacaagtgaaattgaagcagttttattgtaagatttggaagagtgcaggatgtttatcatagcacattattcatatttattactcttcctatgtagataagtaatgtcctagatttacaacatagaaaaacaggtagagacgtttagctgtgagtgtaaaagtataaatcaattaagtgccagattttgataatcaccagccgctcatttaagtcctatgttacaaagttactcttaccctttttttacattacttgataaaggcaatgtttaattacatatttcctgttaactagctggtagagttcatacctaaagtcagtaaataatgttaagaattttttccagctgagcaaatggatatgtatctagttgtaagaaatcaagaagaggatataaaatataatcaggatgtggactctgaaacggaataacctctttgtcctgtaacttttttcacttgtaataatacagcattctcaccctattaaatggaaatttagagcacccttaaattccggaataattaaaattgctatttggattgaaaaagcccttaggcaatatttattgaatattaggaaataacttttataagattagaatccattttttatagaaaccaaatttaaaagtatacatattttaatatgtgttgtggtaatacaataaccacaattgaacacacagttttaaagctttttatatttagtagcagttgaatatatatggcatgttttacatagattaattttactatttttctttgtttaaacaagagaaccaaattgaaagccgacagatactgcaaatgactggaatttttgtttctgccttatctttttgtgttttttttttctgaataaaatattcagaggaaatgcttttacagagttcttgagttgttgtgaaattattgtttagctagtagctagtttaaccaggattaaacaagtttaatcaggattcttcatggatgtacttccttggctaactacagtttttcacatggaaatgaaacttacagtacacacttaacgtatcacagaatttttttctggatttcctgtcctgaagcatgaagtgtactagaaaccaattcttcctgcgctacttgtggaatctttcttactggatcataatcttactttactttatacaatagatgcttaatcagtgcctttaataggaagttggaaactccaaatccaatcaacaaggctttgattctgcctcctaagtactacccagatcacagacaatccaaatatcagaactaggggtctgggcagagaggacaaatcatctattagggagtgggacagaaagtggaaacattacaaaggagcaagtaggctcagaacagaggggagagtagtactggggaaactccctacggaggacaggttagccacagtggatatgtatgtgatgcttttgtcctcgtgggctggaatggaagctgataaagaagttcagacgctacgtgttgcttaggtctgcttcgttgaagcctgtctctttcagagttcctaaacacaatattcccatggcatctaatcccagtgagtgctccaaagccaggctgtgtatcagatgccacgggaaattctgcctcaggactgaggttggttcaagcatctggatgatgtcaaaagtccacattgtgtgctggcctaacctgaaagaccctatctagttctagcctttaaattccttctgtcaccaaatctggagttacatggcatctgtacaatctgggtagctgaggcatgggatcagccctttaaaggagattttggagctttcattgtaggtctagcttcaacttggcactcccagttccaatagctggactttctctcatcgtgtgttctgatccttggattgggaaaaaagtaaccactctgatcccacaatgcagtggttccagttcccaactggtgactattttgcctcccaggggacatttttggttttcccaactggaatgtggtgttagagagtagaggctagggatgctgcgaagcatgtggcagaatcctgttccacccagaatgctaacagtgccaaggttatggagccttcccacccaagggcttggtctattccttgcttttgccagctgcctaacccttaaacacaacagttcaaatctatatgcataagcatctcctagggaccctgcacgtttccaatatcgactactgagacccatccgtagagatacaggctaggaagtctaggattgggctcaaaatttgcattttaacaagtactccaggtcattctgaagcaagcgatacaaaccacagaatgaggaacaccgccttcaagagactgagtcttgcttcccaacactagcttggtatctgagaccatctgcctgctgactggcttttctggcacaaacattctgcatgtaggcccagtgtgttcctcgactccatatcaacccgttcaccctcatgttcccttggttcctgtccccagtccagcgagcagaactgattacagatcttgacaacagaaggtacagatttaaaataacttgcctgttcccgtggaatttatccactagtgaaggaggacaagtggacaaggggagagggtaggtgggcgctccttcccttttcctcccattccactttatacaaaccccagctagaccactgggagagcaacggaggttaagaatgactgcctctaaatattgtcatttggtccactcttcttccatcttgtatacaaggatatcatgactttggtttaaagcactactgaaaccaagataaactgtggcttagcattcccccgatggatcagtctagtaatcttatcaaaaccaagattacctaaaagcactaaccaaaggaaaagctccctcaccccaacctatgactgctcacatttttcagattgaatcatttcaattgtattttaagatccattgactctttaccacctccaagctgctcctgaacacaactgattattttaattttgaaaactttctcacttctagaatttccacttgagcctttgttattattgtagtttcttcttctctgctgtgatttcctatccatttattttaagggtttttggggttttgattttagtaagaattacaataactactttaaaaatccgcactaattccaacatctgggtcatctcgaagtcagtctctattgattgcctttttctttgaatatgtttctgtatttttttgatataatgggattgaattctgaagattgtaaaactagattttgttttgttcctctgaaaattttgataattttttgttgtatttgttgtattttgtttgattttttttctattgtatactttgcaatatattttcctccaatggttttaacatttctatttctcaaaatatttatgtttatgttaaaaattatacaaagtagcttggtgcagtggctcccctctgtaatcccagaacttttagaggccaaggcaggagggtcactcgagcccaggagttggaaaccagcctagacaacagggcaagaccctgtctccacaaaaaattattagcgtggtgcaaaaagtaattgcgggttttgccattactttcaatggcaaaacccgcaattacccttgcaccaaccgataaaaaataagctggatatggtggtggcttgtgcctgtggtctcagctatttgggaagtgaaggcagaggtgggaggattgcttgagcccaggagttccaggccagcctgagaccctgtgtctatgagaaaagaaaaaatttagctgggcccacgtacctgtggtactagctacttgggaggcaaaggcagaggtgccagaatcacttgagcccggaagctcaaggctgcagggcactgtgattatgccactgcactccagcctgggtgatggagcacgaccctgattccaaataataattagaaaaaggaaagacctagaacaccaggttagggttaagtattctaaaatttagctaacttactctgttctctataaaacaggttgtcacagaaaatatagcatgcccagttaatttgaaatttcagataaacaaatactttttttagtgtaagtatatcctatgcaatatttgggacatgcttatactaaaatattattccttgtttatctgaaattgaaatttaactaggtattacataattatagcagcctgaccataaaagatatgtaggctgagcaaaattctactttaaactgcaagctttataataaatgcattattaatcaagaactattatttactgagacctgtgtagatccccatatttatcttttatattgtggagctaggaaagctacataaagaacatttatagaaataaatgactgttctatagctgaaaggaaaactctagcttttatttttctccccaaacttaagctttattctacgtttgtataaacaataaaattacagctcaactttggaagcacagatcataatataaaaataaagcaaagatcccagaaatatttaacagacaacgaatctttcacatcatcttactatagcaactaaacatataataacttagaatgatccattaattataaataaagaataaattcttttacaaagcataactattaatattattgaccatcataagagcaaatattttaagtaaaacaccataaatactttacagaaaggagcgagttgcagacacagtcattcttggatttctttcaacaccaggctttcttcccttttgacctgaactgggagttgaatattgcctctctttgccttctgaccctctagtctctgaaacatcttttgtactagaggtatgtgcagagacttcctggaaatttggatttgtaaattgtgctgttgtatcttctaggcactgcagtgatccagatatagagctgttgctcttgcttgtataattgtaacattttgattcaaaaaaggaagtaaaaggaagagttgattaaatttggctactgacattaataataataaataataattgtacttgtaatataaacatctgaaagttttagttctaagaatggctgtcgacataagaaaattatgtaaaaataattaatgtctattataattactttaaccaaagaaaaagtataatttaaagatggctgtttaaggatcaaattgcagcaattggtaaaagtagatattagtcatatttatgaagtgacacacagtgatactgaaggcacttatttctcaagaaacatcattttttcccaacaagaacatactacatcctagacatgagatgaaaataagctttaattttcaccacagcagggcgacaatcagagaactgaggtggtacagatccattagaggaccatatccatgagtctatcagtctctactgtaggacagagcaagaatttttaaagaatctcggtgaaggctccttttcaaaaaaatataaagattaaagcctttgaaacgtaaattattttttccagttattacattgaggacaaagttatagttgcaaagttaagatttttataactatctctaaaattgattctcagtgactcccttgatctacatatgttaaggaaagaggcaagatgaagatgtgttaaatattttccagtttttaataatcactttaatataaggtatacccaaataatggtgaattaaatgacaaagtatgttgctccctctccctctccctctccctctccttctcccctcgccatggcctccctctccctctccctctccctctcgccacggtctccctctccctctctttccacggtctccctctgatgccaggccgaagctggactgtactgctgccatctcggctcactgcaacctccctgcctgattctcctgcctcagcctgccgagtgcctgccattgcaggcacacgccaccacgcctgactggtcttcgtatttttttggtggagacggggttttgctgtgttggccgggctggtctccagctcctaaccgcgagtgatctgccagcctcggcctccggaggtgccgggattgcagacggtgtctggttcactcagtgctcaatggtgcccaggctggagtgcagtggcgtgatcttggctcgctacaacctccacctcccagccacctgccttggcctcccaaagtgctgagagtgcagcctctgcccggccgccaccccgtctgggaagtgaggagcgtctctgcctggccgcccatcgcctgggacgtgaggagtccctctgcctggctgcccagtctggaaagtgaggagcgtctctgcccagccgccatcccatctaggaagtgaggagcgtctctgcccggccgcccatcatctgagatgtggggagcgcctttgccccgccgccccgtctgggatgtgaggagcgcctctgcccggctgcgagcccgtctgggaggtgaggagcgtctctgcccagctgccctgtctgagaagtgaggagaccctccgcctggcaaccgccctgtctgagaagtgaggagcccctccgcccggcagccaccccatctgagaagtgaggagcccctccgcctggcagccaccccatctgggaagtgaggagcgtctctgcccggcagccaccccatccgggagggaggtgggggtcagcccccgccaggccagccgccccatctgggagggaggtgggggggtcagtcccccacctggccagctgccccgtctgggaggtgagaggcgcctctgcccagctgcccctactgggaagtgaggagcccctctgcccggctagccgccccgtccaggagggaggtgggggggtcagccccccacccagccagccgccttgtccgggagggaggtggggtgatcagccccccacctggccagccaccccatccgggagggaggtggggtggttaaccccccgccaggccagccgccccctccaggagggaggtgggggggtcagccccccgcccagccagccgccccgtccgggaggtgaggggcgcctctgcccagccgcccctactgggaagtgaggagcccctctgcccggccagccaccccgtccgggaggtgggggggtcagccccccgcccggccagccgccccgtccgggaggtgaggggcgcctctgcccggccgcccctagtgggaagtgaggagcccctctgcccggccagccgccctgtccgcgagggaggtgggggggtcagccccccacccggccagccgcaccgtccgggagggaggtgggggtgtcagccccctgcccggctagctgcctcgtccgggaggtgaggggcgcctctccctggccacccctactgggaagtgaggagcccctctgcccggccagccgccctgcctgggagggaggtgggggggtcagccccccgtccggccagccgccccgtccaggagggaggtggggggtcagccccccacccggccagcctccccgtccgggagggaggtggaggggtcagccccccgcccggccagccgccctgtccgggagggaggtgggggggtcagccccccgcccggccagccgcccggtctgggaggtgaggggcgcctctgcccggccgcccctactgggaagtgaggagcccctctgcctggccaccaccaagtctgggaggtgtacccaacagctcattgagaacgggccatgatgacaatggcggttttgtggaatagaaaggggggaaaggtggggaaaagattgagaaatcggatggttgccgtgtctgtgtggaaagaagtagacatgggagacttttcattttgttctgtactaagaaaaattcttctgccttgggatcctgttgatctgtgaccttacccccaaacctgtgctctctgaaacatgtgctgtgtccactcagggttaaatggattaagggcggtgcaagatgtgctttgttaaacagatgcttgaaggcagcatgctccttgtttctttgttcacttgtttatctgctgaccttccctccgctattgtcctatgaccctgccaaatccccctctatgagaaacacccaagaataatcaataaaaaaaaaagaccctgtcccctccaaaataaataaataaataaataaataaataaataaataaaaagactgagatttgctaagcacaaagttctttgattatgacacaaacccactgcatgtgtagtattcatctggactgagtacaaacaagatgctcatgctgtgtgctgtgctgtgagtaataaagtcctttgtctctgaaaaaaaaaaaaaaaagaaaaaagaaagtatgttatagcagatgctcactcatcaacctgccttgaaattaaaggtttataaggtgcataagggcaaagcctttgatgttgtcattacattcacaaaggtatctgaggcacgtacagcatgaagttccctaagtgcttgcaacataagcagcactaaattttgttgaataaataaatgaatacttttgtatagcatctgctcaaaatctctgatgtaaaaatgaaaataatctgaaaatatgcaaaactgaattttcccacatacggttgccaattcatacaataagataaatttcaaaatgagaacatgacaataaaatcaagtttcaaaatggctggccttttatagcaaaacccatgttcaaaaaaaggaataagacatcaaatattttgagaaccaaaatttcactgctgcttttctaacaccctgttgttaacctgagcccccatcctcttactgtcagtaacagattttcataataaaatacaagaaacaggccgggtgcctgtcaataacatattttcatcatcaaatacaagaaacaggcagggcacggtggctcacacctgtaatcccagcactttgggaggctgaggcgggtggatcacttgaggtcaggagtttcagacaagcctggccaacatggtgaaacctcatctctactaaaaatacaaaaattagctgggtgtggtggcaggcgcctttaatcccagctaatcaggaggctgaggcagtagaatcgcttgaacctgggaggtggaggttgcagtgaactgagattgagccactgtactccagcctgggagacagagcaagactctgcctaaaaaaaaaataaatacataacataacagaatctctgggacatattcaaagcagtgtgtagaaggaaatttatagcactaaatgcccacaagagaaagcaagaaagatccaaaattgacaccctaacatcacaattaaaagaactagaaaagcaagagcaaacacattcaaaagctagcagaaggcaagaaataactaaaatcagagaagaactgaaggaaatagaacacaaaaaacccttcaaaaaattaatgaatgcagaagctgtttttttgaaaagatcaacaaaatcgatagaccactagcaagactaataaagaagaaaagagagaagaatcaaataggtgcaataaaaaatgataaagggattattaccaccaatcccacagaaatacaaactaccatcagagaatactaaaaaacttctacgcaaataaactagaaaatctagaagaaatggataaattccctgacacatacatcctcccaagactaaaccagaaagaacttgaatctctgaatagaccaataacaggctctgaaattgaggcaaaaatcaatagcttaccatccaaaaaaagtccaggaccagatggattcacagctgaattctaccagaggtacaaggaggagatggtaccattccttctgaaactattccaatcaatagaaaaagagggaattctccctaactcattttaagaggccagcatcatcctgataccaaagcctggcagagacacaaccaaaaaagagaattttagaccaatatccttgatgaacattgatgcaacaatcctcaataaaatactggcaaaccgaatccagcagcacatcaaaaagtttatccaccacgatcaagtgggcttcatccctgagatgcaaggctggttcaacatacgcaaatcaataaatgtaatccagcatataaacagagccaaagacaaaaaccacatgattatctcagcagatgcagaaaaggcctttgacaaaattcaacaacacttcatgctaaaaactctcaataaattaggtattgatgggacatatctcataataatgagagctatctattacaaacccacagccaatatcatactgaatggaaaaaaactggaagcattccctctgaaaactggcacaagacagggatgccctctctcaccactcccattcaacatagtgttggaagttctggccagggcaatcacgtaggagaagggaataaagggtattcaattaggaaaagaggaagtcaaattgtccctgtttgcagatgacatgattgtatagctagaaaaccccactgtctcagcccaaaatctccttaagctgctaagcaacttcagcaaagtctcaggatacaaaatcaatgtacaaaaatcacacgcattcttatacaccaataacaggcaaacagagagccaaatcatgagggaactccctttcaaaattgcttcaaagagaataaaatacctaggaatccaacttacaagggatgtgaaggacctcttcaaagagaactacaaaccattgctcaatgaaataaaagaggatacaaacaaatggaagaacattccatgctcatgggtaggaagaatcaatatcgtgaaagtggccattctgcccaaggtaatttatagattcaatgccatccccatcaagataccaatgactttcttcacagaaatggaaaaatctactttaatgttcatatggaaccaaaaaagagcccacatcgccaagtcaatcctaagccaaaagaacaaagtcggaggcatcatgctacctgacttcaaactatactacaaggctacagtaaccaaaacagcatggtactggtaccaaaacagagatatagatcaatggaacagaacacagccctcagaaataatgctgcatatctacaactatctgatctttgacaaatctgacaaaaacaagcaatggggaaaggattccctatttaataaatggtgctgggaaaactggctagccatatgtagaaagctgaaactggatcccttccttacaccttgtacaaaaattaattcaagatggattaaagacttatatgttagacttaaaaccataaaaaccctagaagaaaacctaggcaataccattcagttcataggcatgggcaaggacttcatgtctaaaacaccaaaagcaatggcaacaaaaaccaaaattgacaaatgggatctaattaaactaaagagcttctgcacagcaaaagaaactaccatcagagtgaacaggcaacctgcagaatgggagaaaattttcacaacctgctcatctgacaaagggctaatatccagaatctacaatgaactcaaacaaatttacaagaaaaaaacaaccccatcaaaaagtgggcacaggatatgaacagacacttctcaaaagaagacatttatgcagccaaaaaacacatgaaaaaatgctcaccatcactggccatcagagaaatgcaaattaaaaccacaatgagatatcatctcacaccggttaaaatggcgatcattaaatgtcaggaaacaacaggtgctggagaggatgtggagaaataggaacacttttacactgttggtgggactgtaaactagatcaaccattgtggaagtcagtgtggcgattcctcaggtatctagaactagaaataccatttgacccagccatcccattactgggtatatacccaaaggaatataaatcatgctgctataaagacacatgtatgtttattgtggcactattcacaatagcaaagacttggaaccaacccaaatgtccaacaatgatagactgcgttaagaaaatgtggcacatatacaccatggattactatgcaggataaaaaatgaagagttcatgtgctttgtagggacatggatgaaactggaaaccatcattctcagtaaactattgcaaggacaaataactgaacaccgcatgttgtcactcataggtgggatttgaacaatgagaagacatggacacaggaaggggaacatcacacactggggactgttgtggtgtgggcggagtggggagggattgcattaggagatatacctaatgctaaatgacgagttaaagggtgcaggacaccagcatggcacatgtatatatatgtaacaaacctgcacgttgtgcacatgtaccctaaaacttaaagtataataaaaaaaaaaaagtcaagaaacaacagatgctggcaagactgtggagaaataaacacttttacactgttggtaggaatgttaattagttcaatcattgtggaagacagtttggcgattctgcaaggatctagaaccagaaataccatttgacccagagatcccattactgggtatataaccaaaggactataaatcattctattataaagatgcatgcacgcgtatgtttatagcagcactattcccattagcaaaaacatggaatcaatccaaatgcccatcaatgatagactggataaagaaaatgtggtgcatacacaccatggaatactatgcagccataaaaaggaatgagatcatgtcttttgcagggacatgcatgaatctggaaaccatcctcttcagcaaactaatacaggaacagaagaccaaacaccacatgttctcactcataagtgggagctgaataatgagaactcctggacacagggagaagaacaatacacactggggcctgtcagtggggacggggagggagagcatcaggataaatagctaacacatgtcaggcttagtacctaggcacctaggcagtgggttgataggtacagcaaatcatcgtagttcacgtttacctatgtaacaaacctgcatgtcctgcacatgtatcctggaacttaaaataaaatttaaaaaataaaaagaaaacacaagagtactgaaaattggctcacagttccacagcctgtacagcaagcatgatgctgacatctgctcggcttctggggaggcctcaggaaacttaacaatcatggtggaagggaaagcaagagcaggaggaagagagagagggggaaggtcctatacactttaaacaacaagatctcatgagaactctatcacaagagcagcgctagggggattatgcttatccattagaaactgctcccatggaccagccacctcccagcaggccacatctccgacagtgggaaccactggaggctgctcccatggaccagccaccttccagcaggccccatctccaacactgggaaccactggaaactgctcccatggaccagccacctcccagcaggccccatctctgacactggggattacatttctatagaaatttccaataattttggaacacatactaataacatatttataaaaatacagtccaaagtagcccaaacaccattcactcttctatttgaaagttttccctctattctaatgtcacaatatccagcgttattaatcagaatcctgcatttaagggcatctgttaaattttatagctgattataaaaccatcatttaaagaggaccaaaatgagacaaaaattgtctgtggatgacaaaaacattaagggcagccacagttaaagacacgaacaacagtctttaaagtagaatttgctgtagagcctattatgagggagatatttctagttattacctcctttattctaaaccatggaaaaaggacctatcaaataaagtccttctagaagagtgaagggctcctggcaatgttctctttaatccatgatgtgggataaggggagttttgactgattatgaggcaatgtatataccactaaagtttcaacaccctaaaaggaataaaaatgggggagggaagtcctggaaaaccagatggagccgtagcagaagatgatttcagtccaccgaaccctgaattgtgggctggttgtgctgcatcgctctgtgacttatggttctgctgcaacaaagatctaattcccagggttataggaaaagacacctgcagtacccctgagtcacagagaagggagaaatccaaacttgacttaagtctagggttcttaaaccacacaatctgctcataaggaggacttcaactctgaagatactgatttggggctgtttcaaagaaagaaattataaatatgagtgggaaagagaacaaccttccccatatccagtggcaaaaaaatgagggagagggaaggaaggaaggaaggagggaaggaaggagagaaggaaggaaggagagagggaagaaaggagggaaggaaggagagagggaaggaaggaaggagggaaggaaggagagaaggaaggaaggagagagggaagaaagggaaggaaggagagagggaaggaaggaagtagggagggagggaggtagggacggaaggaaggaaggaagtagggagggagggagggacggaaggaaggagagagagaaggaaggaatgaaagaaggaaggagagagggaaggagggcaggaaggaaggaaggcagagagggaaggagggagggagggaaggaaggaaggagagagggaaggaaggagagagggaaggaagaaaaggaaggaaagggaaggagggaaggcaggaaggagggaaggaagaagggaaggaaggaaagagggaaggatggaaagatggaaggaaggaaggcaggaaggagggaaggaaggaaagagggaaggaaagagggaaggaaggaaagatggaaggaaggaaggaagggaaggaacttggatatgcacaaaaacaaaatttaatacggaagtctatcatctgacctaattggaaatgtactattttctacaacaatttatacagtccaaagataaaagggtgctgattggtatttgtaactctccagcatatattctgaatcaattttaacatctgctgaaatctaccaattgtcataccttcacaaactaaatcgatactgaagctcaaactttgttatacctgagatttcactaaatttaaacattgcatcccctaatcctagcagagtaactgcatatagaatagagggcacatacttatgcctcacatttgttaccttgactaaatttcccgtagtcatagaagtctttgtccataggggacctggatgctctgacctaatgagtaacaaattgatattaaatcatttacacttacacattgacttcaccaaatgtaaccttacagaactccctctcctgttttttttttaatttgatttatttttaatttttcattttttagagatggggtcttccttcattacccaggctgaatgaagtgtggtggcacaatcgtagttcactgctgccttgaactcctgggctcaagcaatcctcccattttaaccttccaagtagctgggtttacaggcatgcaccaacacagccaattaaaaaaatttatagaagtggagtcttgctatgttgcctaggctggtctctaacttctggcctcaagcaatcctcctgcctcggcctcccaaagtgctgggattacaggtgtgagtcaccgtgcctagcctccccatcttgataaattagcaaatatggttcaacataaattacaacacgacttcaaataaataaaacttattatataaaaccaaatgaattagggaaggggtgataatcttcattgcttcaacgtttagcagtagaatttggcctgttcttaaacctgcaaagaataaatggtgtttcacagtggattgctgtaatgtgactgcagtgctcccattcattaaggcccttgtacccaatacctaatattttggttaattttttttatttcaataggtttttggggaatatgatttttttttttttaatttcaataggtttttgggaaacaggtggtgtttgcttacaggaataagttctttagtggcgatttctgagatttgtggtgcacccatcacccaagcactgtacattgtacccaatatgtactgttttatccctcactgcacccaccccaccactcccagcctttccccgagtccccgaagaccattgtatcattcttacacctgtgcatcctcacagcttagctctcacttatgaatgagaacatacaatgtttggttttccattcctaagttgcttcacttggaataatggtgtccagtttcatctgggttgctgtgaatgcattatttcattccatcttaagaatgagtagtattccatgtggtaaatatttataccacattttctttatccacttactgattgatgtgcatttaggctggtttcaaattcttccaattgcatattgtgctgctataaacatgcgtgtgcaagtatctttttcatataatgacattttcctctgagtagatacccaggagtggaattactggatcaaatgatagatctgcttttagttctttggaaatttcctcactgttttccatagctgttgtactagcttacattccctccaaaaagtgtaaaagtgttccctttttaccacatccatgccaacatctattaatttttgattttttgattatgaccattcttgcaggagtgaaggggtatcatattgtattgtggttttgatttgcatttcccagataattagttatgttgaacattttttcatgtgtttgttggccagttgcttatcttcttttgagaattgtctgttcatgtccttagcccactttttgatgggatgtttttcttgctggtttgtttgagttccttgcagattctgggtattagtcctttaatcagaagtacagattgcgaagattttctcccactctgtaggttatctgtttactctgctgattatttctcttactgctcaggagccttttagtttaattaagtctcatctatttatctttgttttagttgcatttgctttttgggttattggtcatgaagtctttgcctaagccaatgtctagaagggtttttccaatgtcgtcttctagaatttttatggtttcaggtattagatttaagtccttgatccatcttgagttgatttttgaatagggtgagaaatgagcatccactttcattcttctatgtgtggcttgccatttatctcagcaccatttgttgaatagggtattctttctctgctttatgtttttgtttgttttgttgaagattagatgactgtaagtatttggctttatttctgtgttctctattatgttccattgatctatatggctatttttataccagtgccatgctgttttggtgactatggccttctagtatagtttgaagtcggcttctagatttgttctttttgcttagtcttgctttggctatacaaactcttttttggttctaggcttttattaccttaaggtatgtcccttctatgtcttttttagttccatgtgaatttttgtagttctgtgaagactgatgttagcactttaatggggattgcattgagtttgtagattgcttttggcagtatggtattttcacaatattgattttacccatccgtgagcatgggatatgtttccatttgtttgtacctatgatttctatcagcagtgttttgtagttttccttgtagaggtcttttgtctctttggttaagtattccggatataattaagattttgtctgcaaagattgcatgcaattgacaattatgggaatatactattgtaactataggaattataatattcctaagatttttattgcagctattgtaaaagggggtgagttttttatttaattctcagcttgttaactattactgtatagcacagccactgacttgtgtacattaattttgtatcctgaaactttgctgaattcatttaccagtcctagtagcttttgggatgagtctttagggttttctaggtatacgatcatgtcatcagcaaagagtgacagttcgacttcctctttacctatttggatgccctttatttctcttatctgattgctctggtgaggatttctagtactgtgttgaatagaagtggtgaaagtgggcatcattgtcttgttccagttctcagggggaatgctttcaacttttccccattccatataatgttggctgtgtgtttgtcatacatggcttttattaccttaaggtatgtcccttcgatgttaattttgctgagggttttaatcataaagggattctggattttgtcatatgctttttctatgtcgattttgctgagggttttaggcaaaaagggatgctggattttgtcaaatcctttttctgcatgtattgagatgatcatgtgatttttgtttttaattctgtttatgtggtgtatcacatttattgacttacagatgtttaaccatcctgcatccctggtttctcttcagatcgtatacatctttcaccttatgatggttaattttatttgccaagttgggttgtctagatatttggttaaacactctgtatgtgtctgtgagggtgttccttgatgagacaaacatttgaatatgtagacttagtaaagtagttgccctctccagtgtgagtgggcctcatccaatccattaaaacccaaataaaacacaagggtagaggaagagataattcaccctctttgatgatttcagagctgagacgtagatcttctctcgcttttgaagtcagacgtggactgtaacttatgccatcagctttcctggttctcaggaatttaggcttggactggaactccaccattggcagtcctggttctccagcttgctgactgcaggtcctgggacttcttagcctccataaccacatgagccaattccttacaataaacctatatatattcatgcaactgataaatattttgttgttacagatttggctaccatgttctttttgtgcctattttaacagagtctcagtcatagcctgccttcatctctgaagggaccaggcgacccatggagtgcctcggcagcctcgtcattgcatgcaatcttcacagacaagatctcactgcaaccacgtttctacaggagcacaggtgtgacattatactgatgacatcattctcagagaaaattcattttacatactaaggacacacagatacaaggaggcttacacaaagggagtggacctctcctcaacacagtagtgcaaggccctgccactttgcttcaattcctgaaaattccttggtaaacttggggctgctctattcctgacactttcaaaaaacagttattcatcctctcagcatccacaatgttaatacaaacccaacattcttcaatttgtgttttgttttttggaggcacagtcttgctctgtcacccaggctggtatgaagtggcacaatttcagctcactgcagcctcgacctcctgagctcaagcaattctcccatctcggccttccaagtagctcggactgcaagtgtgtgccacgacactcagctaattttgtttaattttttgtagagaaaaggtctcgctatgttacccaggctggtctcaaactcctgggctgaagggatcctcttgcttcagcctcccaaagttctggggttacagttgtgagccactgtgcccagccctttaattctttacttggggttcaggtgacaacatatttcttgtttacaaatcttacttaatctcactgatgctgtcattggcaaactgacccacctcgaatgaagcctcctccaacaagtctggaatctgtccaaatttaaattaacaggtacttctatgaattccctcagagaacacactgtggatgctttagagacctcttcccatgcatcctgaattatctgggttgcatatggtggccataagtagtccatgggcttctgatgtaaaaacaaacctgccccttttgaccctgctctgtacagcatcagggcagtgattgctgaccatatcctggaccctctggaaacagagggctctgcatccatgtccatgagccttcatgcccatctggccatcaggccttgggaagcagcaccccacagccttggcacagctgcagagacctccttgcctcaggatggagtcaaacctggaccccctgccattctcatctgcaggaaacactgccctccttcattctcaggctgtgttgctggaagtcacccgtctccgaggacccttgggatcgactgagtgaccagcagtgaagttcatccaccttctgaatggatgccatcatctgacatgatggagcgcagtgggatgctgctgccttccctcccttagctaggatgtccctgataaaggatgacacccaagcctcagcacaactggccaaacttgaggtggtcatctcagcactgatgctgggccaacaattagccccatttgtacatttttacaaatttttggcaattgtcaagaattgtccaccttccctccccattgaattaaagaaacttcttgcctcatggatactcagaatacaatcaaggtaacagatgcctttttttttaaccaaggacacagtacagatctcacagggacactccttatctcctgcagagttccagacactactgatggtgaccaaggcaacattcatcggaaaacacagtgctaggcttgtgaaagtgtccagtagggcttccactgcccctataggctgcaggcagctgctttagttgagagagagactgagctcctcaaagaattcctatttaagttacaaagcagcgagtggatgccctgctgggttccactgttgccacaggctttgattactctaagttcatgcttcttaggaaagtgcactttttacaccaacgctacacagttccctcagttgcctttactggacatcaaggagttcacatttttgacaaccattcagtcctggactgtccaaggggtggaggtagctccgtacaggaagctgcctgctgcgtgtggatcagtaatatcagacttgcccaacaactcactggagacatgaaaatcaatgcatggggttgcatgatatcacccaaatatttatgaaaacacttgtgtggccagagaccccagatatctaaaccaaagcatggggaatgcatgacatcacccaaatatttacgaacatgcttgtgctgccagagaccccagatcactttccctgcctcctgctaaataaatgggggtcgtagctttgcattggcttccacattacattactcataactgtggccttcctaatctctcatgtccctaagcacttattataatgtctcagcagctttcagcctctcaaaatattagtcatcatgaaaataaatgtctgatattaaagaatcaggggtcaattgtattgtgacacctaaaatttcatgcagcaccccaccatgtcctcagcctaatgactttcatgcccccaccagactgcaaaactctgaattagtcaagcacatcactgaagggaccaggggttaccccaccctctgatttctaccaagcctgcctcccacaccctcagttccagagtgctaccctgggtagacctgcataaatacagtgtcatcccccgctgggctgagtatgtgtgacgagtaaattactgggaatttcgtctgctcagtgttagttttgtctgcagccattcccagaattctagggcaagactagcttcttcgccaatggggtgaacaggaaggaacccatgtaggaattgcctttttaaaaaaatcccttcccaccctcttaattatgtaatgcttgcatttttatagcttttttctcattccattacctgaggtcagccactgatatttaacccatccttagcctcggaggagggcagaggagcactggtcatattgatttcgctagcggtgacatgatttccttctgtgccactcaaattctctccttctttaacttgttgctcagtaggttgtgtttcactcgtctttgcagattgttaggaagatgagaatcagctttcatttttgatgttgccatagagaagactccatggtaatctttatttgcacaatcaactttttcttttcccccagaaattgcaaattcttatgtgagagacagctttctggaatctgcaaacatagattatcgtctctcttttgatggtaaatttcttatatccccaccaacaataaaatacttacatataattttggcatgtcatattgattgccaactacacgtaagaacattccttgattttaaatctagactaattatgaaaatttgggtagtcatacaaaattattttgtacaaatttatagaccttaggattaaatgagttactattaactaatatttattgagcagtcaagtgtatggcagaagcttactatgtactatttcattttatacttaaaacaatattctatgcaaaatgctataatttccccatgcctccaatttggacatgataaaactgggtctcgtaaacttttcaccccagagttctctgcttagtaagaagtagaagtatgtctaaacctaagtcatctgatttcagagcccatatagttaaatgctctaaatgcatcttcccatagtgatcgtgactatgagagcctgtcacatgatgtaggacagtgcttccctgtaacgtgtgcaagattcccgtgatgatggtgactatgagaccctgtcagatacgatgcaggacagttctttcctcgaacatgcacaagattcccgtgatgatagtgattatgagagccctgtcacatatgatgtaagacagtgcttccctgtaacatgtgcaacattcccctgatgattgtgactatgagtgcctgtctgatacgatgtaggacagtgcttccctgtaacatgcacaagattcccgtgatgatggtgactatgagagcctgtcacatatgatgtaggacagtgcttccctgtaacatgtacaagattcaccctggaatcttattaaaatgcaaactcgtagaccacactttgactagctaagacaagagcatttaaatggatgtccaggtgacagtgttaagatcctactgttcgtgtgggcactggctcaccatattaacaaagcttaggacctccagtccctgctggaaaagaaatacagatacataggatgtgactgtgcatatggaatgtctgttgtgttctcgacattgtactagacactagagataaaaagtcaaatatcccttgcctctttctgaaaggagcttcctacacagtggcttctgactgcagtgtatattttctcttctgccctgggtgggtgagctctatctcaatgttggtaacttaacactgcccagtgggttttacgggggagaccatagctagctgcgctcccacatagctatgaccatagcatatctcgtaatgccatttcccctttgtcagaaggctccctccagtatcatacatacacgctccccatgattataaattcttcctctttccactaaatgttcctaaatcttgcaaagataaaaacataaaccacattcttgtcataatagttatatattaatgatgaaagttccttacttttcttccttttctttttgcgatggagtctcgctctgtccccaggttggagtgcagtggcgcgatctcggttccctgcaagctccacctcccgggttcatgccattctcctgcctcagccttccgagtagctgggactacaggcacccaccaccacacctggctaatttttttttgtatttttaatagagacggggtttcaccatgttagccagatggtcttgatctcctgatcttgtgatccacaagcctcggcctcccaaagtgctgggattacaggcatgagccaccgcacccagcccaagttccttactttttatgtgtttaatattttctcccaatttatagaatatattgattaagaataaattttagccatgcacatctattacaaacttcatgatatactttgctatttttaaatttcctatactcttataaaatgtgtgttctggactcacattggcttccatttcttccctctggcttctattagtttaggctatgagtagagatggacgaggtggctactgtaatggatcaaggctatgagcagagatggatgaggcagcagctgtaatggattaaggctatgagcatcttgtgaagtaggatgttaaatctgtaaatgtcagaatgaatccaaacttaccaattcaaaactggattgtaaaaccgctcaaaaaaactgaaaacacagctctacactttaggaggctgaggcaggcagattgcttaagttcaagagttggagacaagtctagaaaacatggaaaaactgtctctacaaaaaatatatatatttttaattagctgggtatggtggtatgagcctgtggtcccagcttttcaggaggctgaggtgagaggatggcttgagcccagaaggtagaggctacagtgagttctgatcatgccactgcattccagcctaggtgacagagtgagacccgtctcaaaaacaaacaataacagctctaaacgaaagtggctagaaaagtagcttaagttgttcctgtgtggttaaatagaaacataaatgaactacttatgtgccccaggggcttcataatgctgagagcaaagtcaattattccagcaggttctagcaaactttatcatatcatggggttcaatgaaaatatcaaatcataaatataataatcaaatctgaaagtgaatctagtttcaaagacctcagaagccagtgtgtaggaagctcttttcagatagagacaagggattatttgacttcttatctctgttgtctagcacaatgtccagaacacaacagatattccatatgcacagtcacatcctatgtatgtgtatgtgtatttcttttccagcaaggactagaggtcctaaactttgtttatatggtgagccagtgcccaaatgagcaggagaatcttagcacagtcacctacacactcatttcaatgctctggccccttatccaagctagtcaatgtgtggtctatggttttgcattttaagggatctccgggtgaatcttgtggctgtcaaaggagaagcactgccctcaaaatatagaaaaggtgaactaatttatccaggcaggctggctatttatttatgtatttatttatctttttgatgggaagattcaaattgacatacacaatcacccccataaagatttcaggtaaaaaacaaacaaaggtttagatatcagatgtgttttgcaattaccgcaccagtctttttactacagaatctagtagcatatttcccaatagatctaggtgaaaatttctatctcatgagccttctgtcagtatttttaaaattggacactctattagtggccacattgaatctcttacaggcatctcactcaaactgcagccatactttccaataggccccataaaaatccttgttctggagcaatctaatatatttattcacctctttagacacttaggtaagtataataatacaagttttgtgtgtgtgtgtgtgtgtgtattgtgtaccttgtgacctcttttccagtttctgcaacacctgaaggtgaggcaagcttaatgtaaataatgtccagcaatgttagaaatgttgacttttatgtgtccatcaggaaaaaaggatgaatgttattgtagaggaaattttcattctggaaaaaaatgcatactgtttgaatattactttcatgctttccacagatattatacacagatattatattccaaggattatgttgcaatgtcttcaaaaatagaaaattcattttatatttctagatgaaaataataatagtaattagcctacctttggggaaatgtgacaaaaatactaatgatgattacaactcattaaaagcataaaatgtgcaatgatttaaactacatgttctttctatgaatctgcgtagaaatatagacatatttgataaatgctatttaaagtctgagtgctttggtaaatgattcgtctataggttgaagggattacttttatctgtcttcatagtgagaattagatttctattctttataaagcagggaatacagattgtgcatggagtaaaagcattcaatccttattaataatgatggtagctgcgctgcagaaaagaaagcctgtcagagtaacgtgttcagttttacatcataatcagaggtatgtcgatctctgttgaaggtagaattaaaaacgccttcaacatttttaaaataatagatgaaaaacatctcaaagtcacttttaaaatttgaattgacgattccacataacagggaaaggacaaagaacatcttaaatacttcacgatggaagtgatgttttaagtgcaatttcatcaaggagaagtttttccagaaagtcttttgacctcagtaagaagcttatttactctggtaaatagtttctagtaagatgagaaagacttgattttttaaaaacaataaaaaattcacattgtttaatctaatgttgtgatttcaaaagtactacttttgcccttatagttacgcatgtgtatttatatgcattttcttggttcattcaaacgccaataaaatactttactatccaggccnnnnnnnnnnnnnnnnnnnnnnnnnnnnnnnnnnnnnnnnnnnnnnnnnnnnnnnnnnnnnnnnnnnnnnnnnnnnnnnnnnnnnnnnnnnnnnnnnnnnnnnnnnnnnnnnnnnnnnnnnnnnnnnnnnnnnnnnnnnnnnnnnnnnnnnnnnnnnnnnnnnnnnnnnnnnnnnnnnnnnnnnnnnnnnnnnnnnnnnnnnnnnnnnnnnnnnnnnnnnnnnnnnnnnnnnnnnnnnnnnnnnnnnnnnnnnnnnnnnnnnnnnnnnnnnnnnnnnnnnnnnnnnnnnnnnnnnnnnnnnnnnnnnnnnnnnnnnnnnnnnnnnnnnnnnnnnnnnnnnnnnnnnnnnnnnnnnnnnnnnnnnnnnnnnnnnnnnnnnnnnnnnnnnnnnnnnnnnnnnnnnnnnnnnnnnnnnnnnnnnnnnnnnnnnnnnnnnnnnnnnnnnnnnnnnnnnnnnnnnnnnnnnnnnnnnnnnnnnnnnnnnnnnnnnnnnnnnnnnnnnnnnnnnnnnnnnnnnnnnnnnnnnnnnnnnnnnnnnnnnnnnnnnnnnnnnnnnnnnnnnnnnnnnnnnnnnnnnnnnnnnnnnnnnnnnnnnnnnnnnnnnnnnnnnnnnnnnnnnnnnnnnnnnnnnnnnnnnnnnnnnnnnnnnnnnnnnnnnnnnnnnnnnnnnnnnnnnnnnnnnnnnnnnnnnnnnnnnnnnnnnnnnnnnnnnnnnnnnnnnnnnnnnnnnnnnnnnnnnnnnnnnnnnnnnnnnnnnnnnnnnnnnnnnnnnnnnnnnnnnnnnnnnnnnnnnnnnnnnnnnnnnnnnnnnnnnnnnnnnnnnnnnnnnnnnnnnnnnnnnnnnnnnnnnnnnnnnnnnnnnnnnnnnnnnnnnnnnnnnnnnnnnnnnnnnnnnnnnnnnnnnnnnnnnnnnnnnnnnnnnnnnnnnnnnnnnnnnnnnnnnnnnnnnnnnnnnnnnnnnnnnnnnnnnnnnnnnnnnnnnnnnnnnnnnnnnnnnnnnnnnnnnnnnnnnnnnnnnnnnnnnnnnnnnnnnnnnnnnnnnnnnnnnnnnnnnnnnnnnnnnnnnnnnnnnnnnnnnnnnnnnnnnnnnnnnnnnnnnnnnnnnnnnnnnnnnnnnnnnnnnnnnnnnnnnnnnnnnnnnnnnnnnnnnnnnnnnnnnnnnnnnnnnnnnnnnnnnnnnnnnnnnnnnnnnnnnnnnnnnnnnnnnnnnnnnnnnnnnnnnnnnnnnnnnnnnnnnnnnnnnnnnnnnnnnnnnnnnnnnnnnnnnnnnnnnnnnnnnnnnnnnnnnnnnnnnnnnnnnnnnnnnnnnnnnnnnnnnnnnnnnnnnnnnnnnnnnnnnnnnnnnnnnnnnnnnnnnnnnnnnnnnnnnnnnnnnnnnnnnnnnnnnnnnnnnnnnnnnnnnnnnnnnnnnnnnnnnnnnnnnnnnnnnnnnnnnnnnnnnnnnnnnnnnnnnnnnnnnnnnnnnnnnnnnnnnnnnnnnnnnnnnnnnnnnnnnnnnnnnnnnnnnnnnnnnnnnnnnnnnnnnnnnnnnnnnnnnnnnnnnnnnnnnnnnnnnnnnnnnnnnnnnnnnnnnnnnnnnnnnnnnnnnnnnnnnnnnnnnnnnnnnnnnnnnnnnnnnnnnnnnnnnnnnnnnnnnnnnnnnnnnnnnnnnnnnnnnnnnnnnnnnnnnnnnnnnnnnnnnnnnnnnnnnnnnnnnnnnnnnnnnnnnnnnnnnnnnnnnnnnnnnnnnnnnnnnnnnnnnnnnnnnnnnnnnnnnnnnnnnnnnnnnnnnnnnnnnnnnnnnnnnnnnnnnnnnnnnnnnnnnnnnnnnnnnnnnnnnnnnnnnnnnnnnnnnnnnnnnnnnnnnnnnnnnnnnnnnnnnnnnnnnnnnnnnnnnnnnnnnnnnnnnnnnnnnnnnnnnnnnnnnnnnnnnnnnnnnnnnnnnnnnnnnnnnnnnnnnnnnnnnnnnnnnnnnnnnnnnnnnnnnnnnnnnnnnnnnnnnnnnnnnnnnnnnnnnnnnnnnnnnnnnnnnnnnnnnnnnnnnnnnnnnnnnnnnnnnnnnnnnnnnnnnnnnnnnnnnnnnnnnnnnnnnnnnnnnnnnnnnnnnnnnnnnnnnnnnnnnnnnnnnnnnnnnnnnnnnnnnnnnnnnnnnnnnnnnnnnnnnnnnnnnnnnnnnnnnnnnnnnnnnnnnnnnnnnnnnnnnnnnnnnnnnnnnnnnnnnnnnnnnnnnnnnnnnnnnnnnnnnnnnnnnnnnnnnnnnnnnnnnnnnnnnnnnnnnnnnnnnnnnnnnnnnnnnnnnnnnnnnnnnnnnnnnnnnnnnnnnnnnnnnnnnnnnnnnnnnnnnnnnnnnnnnnnnnnnnnnnnnnnnnnnnnnnnnnnnnnnnnnnnnnnnnnnnnnnnnnnnnnnnnnnnnnnnnnnnnnnnnnnnnnnnnnnnnnnnnnnnnnnnnnnnnnnnnnnnnnnnnnnnnnnnnnnnnnnnnnnnnnnnnnnnnnnnnnnnnnnnnnnnnnnnnnnnnnnnnnnnnnnnnnnnnnnnnnnnnnnnnnnnnnnnnnnnnnnnnnnnnnnnnnnnnnnnnnnnnnnnnnnnnnnnnnnnnnnnnnnnnnnnnnnnnnnnnnnnnnnnnnnnnnnnnnnnnnnnnnnnnnnnnnnnnnnnnnnnnnnnnnnnnnnnnnnnnnnnnnnnnnnnnnnnnnnnnnnnnnnnnnnnnnnnnnnnnnnnnnnnnnnnnnnnnnnnnnnnnnnnnnnnnnnnnnnnnnnnnnnnnnnnnnnnnnnnnnnnnnnnnnnnnnnnnnnnnnnnnnnnnnnnnnnnnnnnnnnnnnnnnnnnnnnnnnnnnnnnnnnnnnnnnnnnnnnnnnnnnnnnnnnnnnnnnnnnnnnnnnnnnnnnnnnnnnnnnnnnnnnnnnnnnnnnnnnnnnnnnnnnnnnnnnnnnnnnnnnnnnnnnnnnnnnnnnnnnnnnnnnnnnnnnnnnnnnnnnnnnnnnnnnnnnnnnnnnnnnnnnnnnnnnnnnnnnnnnnnnnnnnnnnnnnnnnnnnnnnnnnnnnnnnnnnnnnnnnnnnnnnnnnnnnnnnnnnnnnnnnnnnnnnnnnnnnnnnnnnnnnnnnnnnnnnnnnnnnnnnnnnnnnnnnnnnnnnnnnnnnnnnnnnnnnnnnnnnnnnnnnnnnnnnnnnnnnnnnnnnnnnnnnnnnnnnnnnnnnnnnnnnnnnnnnnnnnnnnnnnnnnnnnnnnnnnnnnnnnnnnnnnnnnnnnnnnnnnnnnnnnnnnnnnnnnnnnnnnnnnnnnnnnnnnnnnnnnnnnnnnnnnnnnnnnnnnnnnnnnnnnnnnnnnnnnnnnnnnnnnnnnnnnnnnnnnnnnnnnnnnnnnnnnnnnnnnnnnnnnnnnnnnnnnnnnnnnnnnnnnnnnnnnnnnnnnnnnnnnnnnnnnnnnnnnnnnnnnnnnnnnnnnnnnnnnnnnnnnnnnnnnnnnnnnnnnnnnnnnnnnnnnnnnnnnnnnnnnnnnnnnnnnnnnnnnnnnnnnnnnnnnnnnnnnnnnnnnnnnnnnnnnnnnnnnnnnnnnnnnnnnnnnnnnnnnnnnnnnnnnnnnnnnnnnnnnnnnnnnnnnnnnnnnnnnnnnnnnnnnnnnnnnnnnnnnnnnnnnnnnnnnnnnnnnnnnnnnnnnnnnnnnnnnnnnnnnnnnnnnnnnnnnnnnnnnnnnnnnnnnnnnnnnnnnnnnnnnnnnnnnnnnnnnnnnnnnnnnnnnnnnnnnnnnnnnnnnnnnnnnnnnnnnnnnnnnnnnnnnnnnnnnnnnnnnnnnnnnnnnnnnnnnnnnnnnnnnnnnnnnnnnnnnnnnnnnnnnnnnnnnnnnnnnnnnnnnnnnnnnnnnnnnnnnnnnnnnnnnnnnnnnnnnnnnnnnnnnnnnnnnnnnnnnnnnnnnnnnnnnnnnnnnnnnnnnnnnnnnnnnnnnnnnnnnnnnnnnnnnnnnnnnnnnnnnnnnnnnnnnnnnnnnnnnnnnnnnnnnnnnnnnnnnnnnnnnnnnnnnnnnnnnnnnnnnnnnnnnnnnnnnnnnnnnnnnnnnnnnnnnnnnnnnnnnnnnnnnnnnnnnnnnnnnnnnnnnnnnnnnnnnnnnnnnnnnnnnnnnnnnnnnnnnnnnnnnnnnnnnnnnnnnnnnnnnnnnnnnnnnnnnnnnnnnnnnnnnnnnnnnnnnnnnnnnnnnnnnnnnnnnnnnnnnnnnnnnnnnnnnnnnnnnnnnnnnnnnnnnnnnnnnnnnnnnnnnnnnnnnnnnnnnnnnnnnnnnnnnnnnnnnnnnnnnnnnnnnnnnnnnnnnnnnnnnnnnnnnnnnnnnnnnnnnnnnnnnnnnnnnnnnnnnnnnnnnnnnnnnnnnnnnnnnnnnnnnnnnnnnnnnnnnnnnnnnnnnnnnnnnnnnnnnnnnnnnnnnnnnnnnnnnnnnnnnnnnnnnnnnnnnnnnnnnnnnnnnnnnnnnnnnnnnnnnnnnnnnnnnnnnnnnnnnnnnnnnnnnnnnnnnnnnnnnnnnnnnnnnnnnnnnnnnnnnnnnnnnnnnnnnnnnnnnnnnnnnnnnnnnnnnnnnnnnnnnnnnnnnnnnnnnnnnnnnnnnnnnnnnnnnnnnnnnnnnnnnnnnnnnnnnnnnnnnnnnnnnnnnnnnnnnnnnnnnnnnnnnnnnnnnnnnnnnnnnnnnnnnnnnnnnnnnnnnnnnnnnnnnnnnnnnnnnnnnnnnnnnnnnnnnnnnnnnnnnnnnnnnnnnnnnnnnnnnnnnnnnnnnnnnnnnnnnnnnnnnnnnnnnnnnnnnnnnnnnnnnnnnnnnnnnnnnnnnnnnnnnnnnnnnnnnnnnnnnnnnnnnnnnnnnnnnnnnnnnnnnnnnnnnnnnnnnnnnnnnnnnnnnnnnnnnnnnnnnnnnnnnnnnnnnnnnnnnnnnnnnnnnnnnnnnnnnnnnnnnnnnnnnnnnnnnnnnnnnnnnnnnnnnnnnnnnnnnnnnnnnnnnnnnnnnnnnnnnnnnnnnnnnnnnnnnnnnnnnnnnnnnnnnnnnnnnnnnnnnnnnnnnnnnnnnnnnnnnnnnnnnnnnnnnnnnnnnnnnnnnnnnnnnnnnnnnnnnnnnnnnnnnnnnnnnnnnnnnnnnnnnnnnnnnnnnnnnnnnnnnnnnnnnnnnnnnnnnnnnnnnnnnnnnnnnnnnnnnnnnnnnnnnnnnnnnnnnnnnnnnnnnnnnnnnnnnnnnnnnnnnnnnnnnnnnnnnnnnnnnnnnnnnnnnnnnnnnnnnnnnnnnnnnnnnnnnnnnnnnnnnnnnnnnnnnnnnnnnnnnnnnnnnnnnnnnnnnnnnnnnnnnnnnnnnnnnnnnnnnnnnnnnnnnnnnnnnnnnnnnnnnnnnnnnnnnnnnnnnnnnnnnnnnnnnnnnnnnnnnnnnnnnnnnnnnnnnnnnnnnnnnnnnnnnnnnnnnnnnnnnnnnnnnnnnnnnnnnnnnnnnnnnnnnnnnnnnnnnnnnnnnnnnnnnnnnnnnnnnnnnnnnnnnnnnnnnnnnnnnnnnnnnnnnnnnnnnnnnnnnnnnnnnnnnnnnnnnnnnnnnnnnnnnnnnnnnnnnnnnnnnnnnnnnnnnnnnnnnnnnnnnnnnnnnnnnnnnnnnnnnnnnnnnnnnnnnnnnnnnnnnnnnnnnnnnnnnnnnnnnnnnnnnnnnnnnnnnnnnnnnnnnnnnnnnnnnnnnnnnnnnnnnnnnnnnnnnnnnnnnnnnnnnnnnnnnnnnnnnnnnnnnnnnnnnnnnnnnnnnnnnnnnnnnnnnnnnnnnnnnnnnnnnnnnnnnnnnnnnnnnnnnnnnnnnnnnnnnnnnnnnnnnnnnnnnnnnnnnnnnnnnnnnnnnnnnnnnnnnnnnnnnnnnnnnnnnnnnnnnnnnnnnnnnnnnnnnnnnnnnnnnnnnnnnnnnnnnnnnnnnnnnnnnnnnnnnnnnnnnnnnnnnnnnnnnnnnnnnnnnnnnnnnnnnnnnnnnnnnnnnnnnnnnnnnnnnnnnnnnnnnnnnnnnnnnnnnnnnnnnnnnnnnnnnnnnnnnnnnnnnnnnnnnnnnnnnnnnnnnnnnnnnnnnnnnnnnnnnnnnnnnnnnnnnnnnnnnnnnnnnnnnnnnnnnnnnnnnnnnnnnnnnnnnnnnnnnnnnnnnnnnnnnnnnnnnnnnnnnnnnnnnnnnnnnnnnnnnnnnnnnnnnnnnnnnnnnnnnnnnnnnnnnnnnnnnnnnnnnnnnnnnnnnnnnnnnnnnnnnnnnnnnnnnnnnnnnnnnnnnnnnnnnnnnnnnnnnnnnnnnnnnnnnnnnnnnnnnnnnnnnnnnnnnnnnnnnnnnnnnnnnnnnnnnnnnnnnnnnnnnnnnnnnnnnnnnnnnnnnnnnnnnnnnnnnnnnnnnnnnnnnnnnnnnnnnnnnnnnnnnnnnnnnnnnnnnnnnnnnnnnnnnnnnnnnnnnnnnnnnnnnnnnnnnnnnnnnnnnnnnnnnnnnnnnnnnnnnnnnnnnnnnnnnnnnnnnnnnnnnnnnnnnnnnnnnnnnnnnnnnnnnnnnnnnnnnnnnnnnnnnnnnnnnnnnnnnnnnnnnnnnnnnnnnnnnnnnnnnnnnnnnnnnnnnnnnnnnnnnnnnnnnnnnnnnnnnnnnnnnnnnnnnnnnnnnnnnnnnnnnnnnnnnnnnnnnnnnnnnnnnnnnnnnnnnnnnnnnnnnnnnnnnnnnnnnnnnnnnnnnnnnnnnnnnnnnnnnnnnnnnnnnnnnnnnnnnnnnnnnnnnnnnnnnnnnnnnnnnnnnnnnnnnnnnnnnnnnnnnnnnnnnnnnnnnnnnnnnnnnnnnnnnnnnnnnnnnnnnnnnnnnnnnnnnnnnnnnnnnnnnnnnnnnnnnnnnnnnnnnnnnnnnnnnnnnnnnnnnnnnnnnnnnnnnnnnnnnnnnnnnnnnnnnnnnnnnnnnnnnnnnnnnnnnnnnnnnnnnnnnnnnnnnnnnnnnnnnnnnnnnnnnnnnnnnnnnnnnnnnnnnnnnnnnnnnnnnnnnnnnnnnnnnnnnnnnnnnnnnnnnnnnnnnnnnnnnnnnnnnnnnnnnnnnnnnnnnnnnnnnnnnnnnnnnnnnnnnnnnnnnnnnnnnnnnnnnnnnnnnnnnnnnnnnnnnnnnnnnnnnnnnnnnnnnnnnnnnnnnnnnnnnnnnnnnnnnnnnnnnnnnnnnnnnnnnnnnnnnnnnnnnnnnnnnnnnnnnnnnnnnnnnnnnnnnnnnnnnnnnnnnnnnnnnnnnnnnnnnnnnnnnnnnnnnnnnnnnnnnnnnnnnnnnnnnnnnnnnnnnnnnnnnnnnnnnnnnnnnnnnnnnnnnnnnnnnnnnnnnnnnnnnnnnnnnnnnnnnnnnnnnnnnnnnnnnnnnnnnnnnnnnnnnnnnnnnnnnnnnnnnnnnnnnnnnnnnnnnnnnnnnnnnnnnnnnnnnnnnnnnnnnnnnnnnnnnnnnnnnnnnnnnnnnnnnnnnnnnnnnnnnnnnnnnnnnnnnnnnnnnnnnnnnnnnnnnnnnnnnnnnnnnnnnnnnnnnnnnnnnnnnnnnnnnnnnnnnnnnnnnnnnnnnnnnnnnnnnnnnnnnnnnnnnnnnnnnnnnnnnnnnnnnnnnnnnnnnnnnnnnnnnnnnnnnnnnnnnnnnnnnnnnnnnnnnnnnnnnnnnnnnnnnnnnnnnnnnnnnnnnnnnnnnnnnnnnnnnnnnnnnnnnnnnnnnnnnnnnnnnnnnnnnnnnnnnnnnnnnnnnnnnnnnnnnnnnnnnnnnnnnnnnnnnnnnnnnnnnnnnnnnnnnnnnnnnnnnnnnnnnnnnnnnnnnnnnnnnnnnnnnnnnnnnnnnnnnnnnnnnnnnnnnnnnnnnnnnnnnnnnnnnnnnnnnnnnnnnnnnnnnnnnnnnnnnnnnnnnnnnnnnnnnnnnnnnnnnnnnnnnnnnnnnnnnnnnnnnnnnnnnnnnnnnnnnnnnnnnnnnnnnnnnnnnnnnnnnnnnnnnnnnnnnnnnnnnnnnnnnnnnnnnnnnnnnnnnnnnnnnnnnnnnnnnnnnnnnnnnnnnnnnnnnnnnnnnnnnnnnnnnnnnnnnnnnnnnnnnnnnnnnnnnnnnnnnnnnnnnnnnnnnnnnnnnnnnnnnnnnnnnnnnnnnnnnnnnnnnnnnnnnnnnnnnnnnnnnnnnnnnnnnnnnnnnnnnnnnnnnnnnnnnnnnnnnnnnnnnnnnnnnnnnnnnnnnnnnnnnnnnnnnnnnnnnnnnnnnnnnnnnnnnnnnnnnnnnnnnnnnnnnnnnnnnnnnnnnnnnnnnnnnnnnnnnnnnnnnnnnnnnnnnnnnnnnnnnnnnnnnnnnnnnnnnnnnnnnnnnnnnnnnnnnnnnnnnnnnnnnnnnnnnnnnnnnnnnnnnnnnnnnnnnnnnnnnnnnnnnnnnnnnnnnnnnnnnnnnnnnnnnnnnnnnnnnnnnnnnnnnnnnnnnnnnnnnnnnnnnnnnnnnnnnnnnnnnnnnnnnnnnnnnnnnnnnnnnnnnnnnnnnnnnnnnnnnnnnnnnnnnnnnnnnnnnnnnnnnnnnnnnnnnnnnnnnnnnnnnnnnnnnnnnnnnnnnnnnnnnnnnnnnnnnnnnnnnnnnnnnnnnnnnnnnnnnnnnnnnnnnnnnnnnnnnnnnnnnnnnnnnnnnnnnnnnnnnnnnnnnnnnnnnnnnnnnnnnnnnnnnnnnnnnnnnnnnnnnnnnnnnnnnnnnnnnnnnnnnnnnnnnnnnnnnnnnnnnnnnnnnnnnnnnnnnnnnnnnnnnnnnnnnnnnnnnnnnnnnnnnnnnnnnnnnnnnnnnnnnnnnnnnnnnnnnnnnnnnnnnnnnnnnnnnnnnnnnnnnnnnnnnnnnnnnnnnnnnnnnnnnnnnnnnnnnnnnnnnnnnnnnnnnnnnnnnnnnnnnnnnnnnnnnnnnnnnnnnnnnnnnnnnnnnnnnnnnnnnnnnnnnnnnnnnnnnnnnnnnnnnnnnnnnnnnnnnnnnnnnnnnnnnnnnnnnnnnnnnnnnnnnnnnnnnnnnnnnnnnnnnnnnnnnnnnnnnnnnnnnnnnnnnnnnnnnnnnnnnnnnnnnnnnnnnnnnnnnnnnnnnnnnnnnnnnnnnnnnnnnnnnnnnnnnnnnnnnnnnnnnnnnnnnnnnnnnnnnnnnnnnnnnnnnnnnnnnnnnnnnnnnnnnnnnnnnnnnnnnnnnnnnnnnnnnnnnnnnnnnnnnnnnnnnnnnnnnnnnnnnnnnnnnnnnnnnnnnnnnnnnnnnnnnnnnnnnnnnnnnnnnnnnnnnnnnnnnnnnnnnnnnnnnnnnnnnnnnnnnnnnnnnnnnnnnnnnnnnnnnnnnnnnnnnnnnnnnnnnnnnnnnnnnnnnnnnnnnnnnnnnnnnnnnnnnnnnnnnnnnnnnnnnnnnnnnnnnnnnnnnnnnnnnnnnnnnnnnnnnnnnnnnnnnnnnnnnnnnnnnnnnnnnnnnnnnnnnnnnnnnnnnnnnnnnnnnnnnnnnnnnnnnnnnnnnnnnnnnnnnnnnnnnnnnnnnnnnnnnnnnnnnnnnnnnnnnnnnnnnnnnnnnnnnnnnnnnnnnnnnnnnnnnnnnnnnnnnnnnnnnnnnnnnnnnnnnnnnnnnnnnnnnnnnnnnnnnnnnnnnnnnnnnnnnnnnnnnnnnnnnnnnnnnnnnnnnnnnnnnnnnnnnnnnnnnnnnnnnnnnnnnnnnnnnnnnnnnnnnnnnnnnnnnnnnnnnnnnnnnnnnnnnnnnnnnnnnnnnnnnnnnnnnnnnnnnnnnnnnnnnnnnnnnnnnnnnnnnnnnnnnnnnnnnnnnnnnnnnnnnnnnnnnnnnnnnnnnnnnnnnnnnnnnnnnnnnnnnnnnnnnnnnnnnnnnnnnnnnnnnnnnnnnnnnnnnnnnnnnnnnnnnnnnnnnnnnnnnnnnnnnnnnnnnnnnnnnnnnnnnnnnnnnnnnnnnnnnnnnnnnnnnnnnnnnnnnnnnnnnnnnnnnnnnnnnnnnnnnnnnnnnnnnnnnnnnnnnnnnnnnnnnnnnnnnnnnnnnnnnnnnnnnnnnnnnnnnnnnnnnnnnnnnnnnnnnnnnnnnnnnnnnnnnnnnnnnnnnnnnnnnnnnnnnnnnnnnnnnnnnnnnnnnnnnnnnnnnnnnnnnnnnnnnnnnnnnnnnnnnnnnnnnnnnnnnnnnnnnnnnnnnnnnnnnnnnnnnnnnnnnnnnnnnnnnnnnnnnnnnnnnnnnnnnnnnnnnnnnnnnnnnnnnnnnnnnnnnnnnnnnnnnnnnnnnnnnnnnnnnnnnnnnnnnnnnnnnnnnnnnnnnnnnnnnnnnnnnnnnnnnnnnnnnnnnnnnnnnnnnnnnnnnnnnnnnnnnnnnnnnnnnnnnnnnnnnnnnnnnnnnnnnnnnnnnnnnnnnnnnnnnnnnnnnnnnnnnnnnnnnnnnnnnnnnnnnnnnnnnnnnnnnnnnnnnnnnnnnnnnnnnnnnnnnnnnnnnnnnnnnnnnnnnnnnnnnnnnnnnnnnnnnnnnnnnnnnnnnnnnnnnnnnnnnnnnnnnnnnnnnnnnnnnnnnnnnnnnnnnnnnnnnnnnnnnnnnnnnnnnnnnnnnnnnnnnnnnnnnnnnnnnnnnnnnnnnnnnnnnnnnnnnnnnnnnnnnnnnnnnnnnnnnnnnnnnnnnnnnnnnnnnnnnnnnnnnnnnnnnnnnnnnnnnnnnnnnnnnnnnnnnnnnnnnnnnnnnnnnnnnnnnnnnnnnnnnnnnnnnnnnnnnnnnnnnnnnnnnnnnnnnnnnnnnnnnnnnnnnnnnnnnnnnnnnnnnnnnnnnnnnnnnnnnnnnnnnnnnnnnnnnnnnnnnnnnnnnnnnnnnnnnnnnnnnnnnnnnnnnnnnnnnnnnnnnnnnnnnnnnnnnnnnnnnnnnnnnnnnnnnnnnnnnnnnnnnnnnnnnnnnnnnnnnnnnnnnnnnnnnnnnnnnnnnnnnnnnnnnnnnnnnnnnnnnnnnnnnnnnnnnnnnnnnnnnnnnnnnnnnnnnnnnnnnnnnnnnnnnnnnnnnnnnnnnnnnnnnnnnnnnnnnnnnnnnnnnnnnnnnnnnnnnnnnnnnnnnnnnnnnnnnnnnnnnnnnnnnnnnnnnnnnnnnnnnnnnnnnnnnnnnnnnnnnnnnnnnnnnnnnnnnnnnnnnnnnnnnnnnnnnnnnnnnnnnnnnnnnnnnnnnnnnnnnnnnnnnnnnnnnnnnnnnnnnnnnnnnnnnnnnnnnnnnnnnnnnnnnnnnnnnnnnnnnnnnnnnnnnnnnnnnnnnnnnnnnnnnnnnnnnnnnnnnnnnnnnnnnnnnnnnnnnnnnnnnnnnnnnnnnnnnnnnnnnnnnnnnnnnnnnnnnnnnnnnnnnnnnnnnnnnnnnnnnnnnnnnnnnnnnnnnnnnnnnnnnnnnnnnnnnnnnnnnnnnnnnnnnnnnnnnnnnnnnnnnnnnnnnnnnnnnnnnnnnnnnnnnnnnnnnnnnnnnnnnnnnnnnnnnnnnnnnnnnnnnnnnnnnnnnnnnnnnnnnnnnnnnnnnnnnnnnnnnnnnnnnnnnnnnnnnnnnnnnnnnnnnnnnnnnnnnnnnnnnnnnnnnnnnnnnnnnnnnnnnnnnnnnnnnnnnnnnnnnnnnnnnnnnnnnnnnnnnnnnnnnnnnnnnnnnnnnnnnnnnnnnnnnnnnnnnnnnnnnnnnnnnnnnnnnnnnnnnnnnnnnnnnnnnnnnnnnnnnnnnnnnnnnnnnnnnnnnnnnnnnnnnnnnnnnnnnnnnnnnnnnnnnnnnnnnnnnnnnnnnnnnnnnnnnnnnnnnnnnnnnnnnnnnnnnnnnnnnnnnnnnnnnnnnnnnnnnnnnnnnnnnnnnnnnnnnnnnnnnnnnnnnnnnnnnnnnnnnnnnnnnnnnnnnnnnnnnnnnnnnnnnnnnnnnnnnnnnnnnnnnnnnnnnnnnnnnnnnnnnnnnnnnnnnnnnnnnnnnnnnnnnnnnnnnnnnnnnnnnnnnnnnnnnnnnnnnnnnnnnnnnnnnnnnnnnnnnnnnnnnnnnnnnnnnnnnnnnnnnnnnnnnnnnnnnnnnnnnnnnnnnnnnnnnnnnnnnnnnnnnnnnnnnnnnnnnnnnnnnnnnnnnnnnnnnnnnnnnnnnnnnnnnnnnnnnnnnnnnnnnnnnnnnnnnnnnnnnnnnnnnnnnnnnnnnnnnnnnnnnnnnnnnnnnnnnnnnnnnnnnnnnnnnnnnnnnnnnnnnnnnnnnnnnnnnnnnnnnnnnnnnnnnnnnnnnnnnnnnnnnnnnnnnnnnnnnnnnnnnnnnnnnnnnnnnnnnnnnnnnnnnnnnnnnnnnnnnnnnnnnnnnnnnnnnnnnnnnnnnnnnnnnnnnnnnnnnnnnnnnnnnnnnnnnnnnnnnnnnnnnnnnnnnnnnnnnnnnnnnnnnnnnnnnnnnnnnnnnnnnnnnnnnnnnnnnnnnnnnnnnnnnnnnnnnnnnnnnnnnnnnnnnnnnnnnnnnnnnnnnnnnnnnnnnnnnnnnnnnnnnnnnnnnnnnnnnnnnnnnnnnnnnnnnnnnnnnnnnnnnnnnnnnnnnnnnnnnnnnnnnnnnnnnnnnnnnnnnnnnnnnnnnnnnnnnnnnnnnnnnnnnnnnnnnnnnnnnnnnnnnnnnnnnnnnnnnnnnnnnnnnnnnnnnnnnnnnnnnnnnnnnnnnnnnnnnnnnnnnnnnnnnnnnnnnnnnnnnnnnnnnnnnnnnnnnnnnnnnnnnnnnnnnnnnnnnnnnnnnnnnnnnnnnnnnnnnnnnnnnnnnnnnnnnnnnnnnnnnnnnnnnnnnnnnnnnnnnnnnnnnnnnnnnnnnnnnnnnnnnnnnnnnnnnnnnnnnnnnnnnnnnnnnnnnnnnnnnnnnnnnnnnnnnnnnnnnnnnnnnnnnnnnnnnnnnnnnnnnnnnnnnnnnnnnnnnnnnnnnnnnnnnnnnnnnnnnnnnnnnnnnnnnnnnnnnnnnnnnnnnnnnnnnnnnnnnnnnnnnnnnnnnnnnnnnnnnnnnnnnnnnnnnnnnnnnnnnnnnnnnnnnnnnnnnnnnnnnnnnnnnnnnnnnnnnnnnnnnnnnnnnnnnnnnnnnnnnnnnnnnnnnnnnnnnnnnnnnnnnnnnnnnnnnnnnnnnnnnnnnnnnnnnnnnnnnnnnnnnnnnnnnnnnnnnnnnnnnnnnnnnnnnnnnnnnnnnnnnnnnnnnnnnnnnnnnnnnnnnnnnnnnnnnnnnnnnnnnnnnnnnnnnnnnnnnnnnnnnnnnnnnnnnnnnnnnnnnnnnnnnnnnnnnnnnnnnnnnnnnnnnnnnnnnnnnnnnnnnnnnnnnnnnnnnnnnnnnnnnnnnnnnnnnnnnnnnnnnnnnnnnnnnnnnnnnnnnnnnnnnnnnnnnnnnnnnnnnnnnnnnnnnnnnnnnnnnnnnnnnnnnnnnnnnnnnnnnnnnnnnnnnnnnnnnnnnnnnnnnnnnnnnnnnnnnnnnnnnnnnnnnnnnnnnnnnnnnnnnnnnnnnnnnnnnnnnnnnnnnnnnnnnnnnnnnnnnnnnnnnnnnnnnnnnnnnnnnnnnnnnnnnnnnnnnnnnnnnnnnnnnnnnnnnnnnnnnnnnnnnnnnnnnnnnnnnnnnnnnnnnnnnnnnnnnnnnnnnnnnnnnnnnnnnnnnnnnnnnnnnnnnnnnnnnnnnnnnnnnnnnnnnnnnnnnnnnnnnnnnnnnnnnnnnnnnnnnnnnnnnnnnnnnnnnnnnnnnnnnnnnnnnnnnnnnnnnnnnnnnnnnnnnnnnnnnnnnnnnnnnnnnnnnnnnnnnnnnnnnnnnnnnnnnnnnnnnnnnnnnnnnnnnnnnnnnnnnnnnnnnnnnnnnnnnnnnnnnnnnnnnnnnnnnnnnnnnnnnnnnnnnnnnnnnnnnnnnnnnnnnnnnnnnnnnnnnnnnnnnnnnnnnnnnnnnnnnnnnnnnnnnnnnnnnnnnnnnnnnnnnnnnnnnnnnnnnnnnnnnnnnnnnnnnnnnnnnnnnnnnnnnnnnnnnnnnnnnnnnnnnnnnnnnnnnnnnnnnnnnnnnnnnnnnnnnnnnnnnnnnnnnnnnnnnnnnnnnnnnnnnnnnnnnnnnnnnnnnnnnnnnnnnnnnnnnnnnnnnnnnnnnnnnnnnnnnnnnnnnnnnnnnnnnnnnnnnnnnnnnnnnnnnnnnnnnnnnnnnnnnnnnnnnnnnnnnnnnnnnnnnnnnnnnnnnnnnnnnnnnnnnnnnnnnnnnnnnnnnnnnnnnnnnnnnnnnnnnnnnnnnnnnnnnnnnnnnnnnnnnnnnnnnnnnnnnnnnnnnnnnnnnnnnnnnnnnnnnnnnnnnnnnnnnnnnnnnnnnnnnnnnnnnnnnnnnnnnnnnnnnnnnnnnnnnnnnnnnnnnnnnnnnnnnnnnnnnnnnnnnnnnnnnnnnnnnnnnnnnnnnnnnnnnnnnnnnnnnnnnnnnnnnnnnnnnnnnnnnnnnnnnnnnnnnnnnnnnnnnnnnnnnnnnnnnnnnnnnnnnnnnnnnnnnnnnnnnnnnnnnnnnnnnnnnnnnnnnnnnnnnnnnnnnnnnnnnnnnnnnnnnnnnnnnnnnnnnnnnnnnnnnnnnnnnnnnnnnnnnnnnnnnnnnnnnnnnnnnnnnnnnnnnnnnnnnnnnnnnnnnnnnnnnnnnnnnnnnnnnnnnnnnnnnnnnnnnnnnnnnnnnnnnnnnnnnnnnnnnnnnnnnnnnnnnnnnnnnnnnnnnnnnnnnnnnnnnnnnnnnnnnnnnnnnnnnnnnnnnnnnnnnnnnnnnnnnnnnnnnnnnnnnnnnnnnnnnnnnnnnnnnnnnnnnnnnnnnnnnnnnnnnnnnnnnnnnnnnnnnnnnnnnnnnnnnnnnnnnnnnnnnnnnnnnnnnnnnnnnnnnnnnnnnnnnnnnnnnnnnnnnnnnnnnnnnnnnnnnnnnnnnnnnnnnnnnnnnnnnnnnnnnnnnnnnnnnnnnnnnnnnnnnnnnnnnnnnnnnnnnnnnnnnnnnnnnnnnnnnnnnnnnnnnnnnnnnnnnnnnnnnnnnnnnnnnnnnnnnnnnnnnnnnnnnnnnnnnnnnnnnnnnnnnnnnnnnnnnnnnnnnnnnnnnnnnnnnnnnnnnnnnnnnnnnnnnnnnnnnnnnnnnnnnnnnnnnnnnnnnnnnnnnnnnnnnnnnnnnnnnnnnnnnnnnnnnnnnnnnnnnnnnnnnnnnnnnnnnnnnnnnnnnnnnnnnnnnnnnnnnnnnnnnnnnnnnnnnnnnnnnnnnnnnnnnnnnnnnnnnnnnnnnnnnnnnnnnnnnnnnnnnnnnnnnnnnnnnnnnnnnnnnnnnnnnnnnnnnnnnnnnnnnnnnnnnnnnnnnnnnnnnnnnnnnnnnnnnnnnnnnnnnnnnnnnnnnnnnnnnnnnnnnnnnnnnnnnnnnnnnnnnnnnnnnnnnnnnnnnnnnnnnnnnnnnnnnnnnnnnnnnnnnnnnnnnnnnnnnnnnnnnnnnnnnnnnnnnnnnnnnnnnnnnnnnnnnnnnnnnnnnnnnnnnnnnnnnnnnnnnnnnnnnnnnnnnnnnnnnnnnnnnnnnnnnnnnnnnnnnnnnnnnnnnnnnnnnnnnnnnnnnnnnnnnnnnnnnnnnnnnnnnnnnnnnnnnnnnnnnnnnnnnnnnnnnnnnnnnnnnnnnnnnnnnnnnnnnnnnnnnnnnnnnnnnnnnnnnnnnnnnnnnnnnnnnnnnnnnnnnnnnnnnnnnnnnnnnnnnnnnnnnnnnnnnnnnnnnnnnnnnnnnnnnnnnnnnnnnnnnnnnnnnnnnnnnnnnnnnnnnnnnnnnnnnnnnnnnnnnnnnnnnnnnnnnnnnnnnnnnnnnnnnnnnnnnnnnnnnnnnnnnnnnnnnnnnnnnnnnnnnnnnnnnnnnnnnnnnnnnnnnnnnnnnnnnnnnnnnnnnnnnnnnnnnnnnnnnnnnnnnnnnnnnnnnnnnnnnnnnnnnnnnnnnnnnnnnnnnnnnnnnnnnnnnnnnnnnnnnnnnnnnnnnnnnnnnnnnnnnnnnnnnnnnnnnnnnnnnnnnnnnnnnnnnnnnnnnnnnnnnnnnnnnnnnnnnnnnnnnnnnnnnnnnnnnnnnnnnnnnnnnnnnnnnnnnnnnnnnnnnnnnnnnnnnnnnnnnnnnnnnnnnnnnnnnnnnnnnnnnnnnnnnnnnnnnnnnnnnnnnnnnnnnnnnnnnnnnnnnnnnnnnnnnnnnnnnnnnnnnnnnnnnnnnnnnnnnnnnnnnnnnnnnnnnnnnnnnnnnnnnnnnnnnnnnnnnnnnnnnnnnnnnnnnnnnnnnnnnnnnnnnnnnnnnnnnnnnnnnnnnnnnnnnnnnnnnnnnnnnnnnnnnnnnnnnnnnnnnnnnnnnnnnnnnnnnnnnnnnnnnnnnnnnnnnnnnnnnnnnnnnnnnnnnnnnnnnnnnnnnnnnnnnnnnnnnnnnnnnnnnnnnnnnnnnnnnnnnnnnnnnnnnnnnnnnnnnnnnnnnnnnnnnnnnnnnnnnnnnnnnnnnnnnnnnnnnnnnnnnnnnnnnnnnnnnnnnnnnnnnnnnnnnnnnnnnnnnnnnnnnnnnnnnnnnnnnnnnnnnnnnnnnnnnnnnnnnnnnnnnnnnnnnnnnnnnnnnnnnnnnnnnnnnnnnnnnnnnnnnnnnnnnnnnnnnnnnnnnnnnnnnnnnnnnnnnnnnnnnnnnnnnnnnnnnnnnnnnnnnnnnnnnnnnnnnnnnnnnnnnnnnnnnnnnnnnnnnnnnnnnnnnnnnnnnnnnnnnnnnnnnnnnnnnnnnnnnnnnnnnnnnnnnnnnnnnnnnnnnnnnnnnnnnnnnnnnnnnnnnnnnnnnnnnnnnnnnnnnnnnnnnnnnnnnnnnnnnnnnnnnnnnnnnnnnnnnnnnnnnnnnnnnnnnnnnnnnnnnnnnnnnnnnnnnnnnnnnnnnnnnnnnnnnnnnnnnnnnnnnnnnnnnnnnnnnnnnnnnnnnnnnnnnnnnnnnnnnnnnnnnnnnnnnnnnnnnnnnnnnnnnnnnnnnnnnnnnnnnnnnnnnnnnnnnnnnnnnnnnnnnnnnnnnnnnnnnnnnnnnnnnnnnnnnnnnnnnnnnnnnnnnnnnnnnnnnnnnnnnnnnnnnnnnnnnnnnnnnnnnnnnnnnnnnnnnnnnnnnnnnnnnnnnnnnnnnnnnnnnnnnnnnnnnnnnnnnnnnnnnnnnnnnnnnnnnnnnnnnnnnnnnnnnnnnnnnnnnnnnnnnnnnnnnnnnnnnnnnnnnnnnnnnnnnnnnnnnnnnnnnnnnnnnnnnnnnnnnnnnnnnnnnnnnnnnnnnnnnnnnnnnnnnnnnnnnnnnnnnnnnnnnnnnnnnnnnnnnnnnnnnnnnnnnnnnnnnnnnnnnnnnnnnnnnnnnnnnnnnnnnnnnnnnnnnnnnnnnnnnnnnnnnnnnnnnnnnnnnnnnnnnnnnnnnnnnnnnnnnnnnnnnnnnnnnnnnnnnnnnnnnnnnnnnnnnnnnnnnnnnnnnnnnnnnnnnnnnnnnnnnnnnnnnnnnnnnnnnnnnnnnnnnnnnnnnnnnnnnnnnnnnnnnnnnnnnnnnnnnnnnnnnnnnnnnnnnnnnnnnnnnnnnnnnnnnnnnnnnnnnnnnnnnnnnnnnnnnnnnnnnnnnnnnnnnnnnnnnnnnnnnnnnnnnnnnnnnnnnnnnnnnnnnnnnnnnnnnnnnnnnnnnnnnnnnnnnnnnnnnnnnnnnnnnnnnnnnnnnnnnnnnnnnnnnnnnnnnnnnnnnnnnnnnnnnnnnnnnnnnnnnnnnnnnnnnnnnnnnnnnnnnnnnnnnnnnnnnnnnnnnnnnnnnnnnnnnnnnnnnnnnnnnnnnnnnnnnnnnnnnnnnnnnnnnnnnnnnnnnnnnnnnnnnnnnnnnnnnnnnnnnnnnnnnnnnnnnnnnnnnnnnnnnnnnnnnnnnnnnnnnnnnnnnnnnnnnnnnnnnnnnnnnnnnnnnnnnnnnnnnnnnnnnnnnnnnnnnnnnnnnnnnnnnnnnnnnnnnnnnnnnnnnnnnnnnnnnnnnnnnnnnnnnnnnnnnnnnnnnnnnnnnnnnnnnnnnnnnnnnnnnnnnnnnnnnnnnnnnnnnnnnnnnnnnnnnnnnnnnnnnnnnnnnnnnnnnnnnnnnnnnnnnnnnnnnnnnnnnnnnnnnnnnnnnnnnnnnnnnnnnnnnnnnnnnnnnnnnnnnnnnnnnnnnnnnnnnnnnnnnnnnnnnnnnnnnnnnnnnnnnnnnnnnnnnnnnnnnnnnnnnnnnnnnnnnnnnnnnnnnnnnnnnnnnnnnnnnnnnnnnnnnnnnnnnnnnnnnnnnnnnnnnnnnnnnnnnnnnnnnnnnnnnnnnnnnnnnnnnnnnnnnnnnnnnnnnnnnnnnnnnnnnnnnnnnnnnnnnnnnnnnnnnnnnnnnnnnnnnnnnnnnnnnnnnnnnnnnnnnnnnnnnnnnnnnnnnnnnnnnnnnnnnnnnnnnnnnnnnnnnnnnnnnnnnnnnnnnnnnnnnnnnnnnnnnnnnnnnnnnnnnnnnnnnnnnnnnnnnnnnnnnnnnnnnnnnnnnnnnnnnnnnnnnnnnnnnnnnnnnnnnnnnnnnnnnnnnnnnnnnnnnnnnnnnnnnnnnnnnnnnnnnnnnnnnnnnnnnnnnnnnnnnnnnnnnnnnnnnnnnnnnnnnnnnnnnnnnnnnnnnnnnnnnnnnnnnnnnnnnnnnnnnnnnnnnnnnnnnnnnnnnnnnnnnnnnnnnnnnnnnnnnnnnnnnnnnnnnnnnnnnnnnnnnnnnnnnnnnnnnnnnnnnnnnnnnnnnnnnnnnnnnnnnnnnnnnnnnnnnnnnnnnnnnnnnnnnnnnnnnnnnnnnnnnnnnnnnnnnnnnnnnnnnnnnnnnnnnnnnnnnnnnnnnnnnnnnnnnnnnnnnnnnnnnnnnnnnnnnnnnnnnnnnnnnnnnnnnnnnnnnnnnnnnnnnnnnnnnnnnnnnnnnnnnnnnnnnnnnnnnnnnnnnnnnnnnnnnnnnnnnnnnnnnnnnnnnnnnnnnnnnnnnnnnnnnnnnnnnnnnnnnnnnnnnnnnnnnnnnnnnnnnnnnnnnnnnnnnnnnnnnnnnnnnnnnnnnnnnnnnnnnnnnnnnnnnnnnnnnnnnnnnnnnnnnnnnnnnnnnnnnnnnnnnnnnnnnnnnnnnnnnnnnnnnnnnnnnnnnnnnnnnnnnnnnnnnnnnnnnnnnnnnnnnnnnnnnnnnnnnnnnnnnnnnnnnnnnnnnnnnnnnnnnnnnnnnnnnnnnnnnnnnnnnnnnnnnnnnnnnnnnnnnnnnnnnnnnnnnnnnnnnnnnnnnnnnnnnnnnnnnnnnnnnnnnnnnnnnnnnnnnnnnnnnnnnnnnnnnnnnnnnnnnnnnnnnnnnnnnnnnnnnnnnnnnnnnnnnnnnnnnnnnnnnnnnnnnnnnnnnnnnnnnnnnnnnnnnnnnnnnnnnnnnnnnnnnnnnnnnnnnnnnnnnnnnnnnnnnnnnnnnnnnnnnnnnnnnnnnnnnnnnnnnnnnnnnnnnnnnnnnnnnnnnnnnnnnnnnnnnnnnnnnnnnnnnnnnnnnnnnnnnnnnnnnnnnnnnnnnnnnnnnnnnnnnnnnnnnnnnnnnnnnnnnnnnnnnnnnnnnnnnnnnnnnnnnnnnnnnnnnnnnnnnnnnnnnnnnnnnnnnnnnnnnnnnnnnnnnnnnnnnnnnnnnnnnnnnnnnnnnnnnnnnnnnnnnnnnnnnnnnnnnnnnnnnnnnnnnnnnnnnnnnnnnnnnnnnnnnnnnnnnnnnnnnnnnnnnnnnnnnnnnnnnnnnnnnnnnnnnnnnnnnnnnnnnnnnnnnnnnnnnnnnnnnnnnnnnnnnnnnnnnnnnnnnnnnnnnnnnnnnnnnnnnnnnnnnnnnnnnnnnnnnnnnnnnnnnnnnnnnnnnnnnnnnnnnnnnnnnnnnnnnnnnnnnnnnnnnnnnnnnnnnnnnnnnnnnnnnnnnnnnnnnnnnnnnnnnnnnnnnnnnnnnnnnnnnnnnnnnnnnnnnnnnnnnnnnnnnnnnnnnnnnnnnnnnnnnnnnnnnnnnnnnnnnnnnnnnnnnnnnnnnnnnnnnnnnnnnnnnnnnnnnnnnnnnnnnnnnnnnnnnnnnnnnnnnnnnnnnnnnnnnnnnnnnnnnnnnnnnnnnnnnnnnnnnnnnnnnnnnnnnnnnnnnnnnnnnnnnnnnnnnnnnnnnnnnnnnnnnnnnnnnnnnnnnnnnnnnnnnnnnnnnnnnnnnnnnnnnnnnnnnnnnnnnnnnnnnnnnnnnnnnnnnnnnnnnnnnnnnnnnnnnnnnnnnnnnnnnnnnnnnnnnnnnnnnnnnnnnnnnnnnnnnnnnnnnnnnnnnnnnnnnnnnnnnnnnnnnnnnnnnnnnnnnnnnnnnnnnnnnnnnnnnnnnnnnnnnnnnnnnnnnnnnnnnnnnnnnnnnnnnnnnnnnnnnnnnnnnnnnnnnnnnnnnnnnnnnnnnnnnnnnnnnnnnnnnnnnnnnnnnnnnnnnnnnnnnnnnnnnnnnnnnnnnnnnnnnnnnnnnnnnnnnnnnnnnnnnnnnnnnnnnnnnnnnnnnnnnnnnnnnnnnnnnnnnnnnnnnnnnnnnnnnnnnnnnnnnnnnnnnnnnnnnnnnnnnnnnnnnnnnnnnnnnnnnnnnnnnnnnnnnnnnnnnnnnnnnnnnnnnnnnnnnnnnnnnnnnnnnnnnnnnnnnnnnnnnnnnnnnnnnnnnnnnnnnnnnnnnnnnnnnnnnnnnnnnnnnnnnnnnnnnnnnnnnnnnnnnnnnnnnnnnnnnnnnnnnnnnnnnnnnnnnnnnnnnnnnnnnnnnnnnnnnnnnnnnnnnnnnnnnnnnnnnnnnnnnnnnnnnnnnnnnnnnnnnnnnnnnnnnnnnnnnnnnnnnnnnnnnnnnnnnnnnnnnnnnnnnnnnnnnnnnnnnnnnnnnnnnnnnnnnnnnnnnnnnnnnnnnnnnnnnnnnnnnnnnnnnnnnnnnnnnnnnnnnnnnnnnnnnnnnnnnnnnnnnnnnnnnnnnnnnnnnnnnnnnnnnnnnnnnnnnnnnnnnnnnnnnnnnnnnnnnnnnnnnnnnnnnnnnnnnnnnnnnnnnnnnnnnnnnnnnnnnnnnnnnnnnnnnnnnnnnnnnnnnnnnnnnnnnnnnnnnnnnnnnnnnnnnnnnnnnnnnnnnnnnnnnnnnnnnnnnnnnnnnnnnnnnnnnnnnnnnnnnnnnnnnnnnnnnnnnnnnnnnnnnnnnnnnnnnnnnnnnnnnnnnnnnnnnnnnnnnnnnnnnnnnnnnnnnnnnnnnnnnnnnnnnnnnnnnnnnnnnnnnnnnnnnnnnnnnnnnnnnnnnnnnnnnnnnnnnnnnnnnnnnnnnnnnnnnnnnnnnnnnnnnnnnnnnnnnnnnnnnnnnnnnnnnnnnnnnnnnnnnnnnnnnnnnnnnnnnnnnnnnnnnnnnnnnnnnnnnnnnnnnnnnnnnnnnnnnnnnnnnnnnnnnnnnnnnnnnnnnnnnnnnnnnnnnnnnnnnnnnnnnnnnnnnnnnnnnnnnnnnnnnnnnnnnnnnnnnnnnnnnnnnnnnnnnnnnnnnnnnnnnnnnnnnnnnnnnnnnnnnnnnnnnnnnnnnnnnnnnnnnnnnnnnnnnnnnnnnnnnnnnnnnnnnnnnnnnnnnnnnnnnnnnnnnnnnnnnnnnnnnnnnnnnnnnnnnnnnnnnnnnnnnnnnnnnnnnnnnnnnnnnnnnnnnnnnnnnnnnnnnnnnnnnnnnnnnnnnnnnnnnnnnnnnnnnnnnnnnnnnnnnnnnnnnnnnnnnnnnnnnnnnnnnnnnnnnnnnnnnnnnnnnnnnnnnnnnnnnnnnnnnnnnnnnnnnnnnnnnnnnnnnnnnnnnnnnnnnnnnnnnnnnnnnnnnnnnnnnnnnnnnnnnnnnnnnnnnnnnnnnnnnnnnnnnnnnnnnnnnnnnnnnnnnnnnnnnnnnnnnnnnnnnnnnnnnnnnnnnnnnnnnnnnnnnnnnnnnnnnnnnnnnnnnnnnnnnnnnnnnnnnnnnnnnnnnnnnnnnnnnnnnnnnnnnnnnnnnnnnnnnnnnnnnnnnnnnnnnnnnnnnnnnnnnnnnnnnnnnnnnnnnnnnnnnnnnnnnnnnnnnnnnnnnnnnnnnnnnnnnnnnnnnnnnnnnnnnnnnnnnnnnnnnnnnnnnnnnnnnnnnnnnnnnnnnnnnnnnnnnnnnnnnnnnnnnnnnnnnnnnnnnnnnnnnnnnnnnnnnnnnnnnnnnnnnnnnnnnnnnnnnnnnnnnnnnnnnnnnnnnnnnnnnnnnnnnnnnnnnnnnnnnnnnnnnnnnnnnnnnnnnnnnnnnnnnnnnnnnnnnnnnnnnnnnnnnnnnnnnnnnnnnnnnnnnnnnnnnnnnnnnnnnnnnnnnnnnnnnnnnnnnnnnnnnnnnnnnnnnnnnnnnnnnnnnnnnnnnnnnnnnnnnnnnnnnnnnnnnnnnnnnnnnnnnnnnnnnnnnnnnnnnnnnnnnnnnnnnnnnnnnnnnnnnnnnnnnnnnnnnnnnnnnnnnnnnnnnnnnnnnnnnnnnnnnnnnnnnnnnnnnnnnnnnnnnnnnnnnnnnnnnnnnnnnnnnnnnnnnnnnnnnnnnnnnnnnnnnnnnnnnnnnnnnnnnnnnnnnnnnnnnnnnnnnnnnnnnnnnnnnnnnnnnnnnnnnnnnnnnnnnnnnnnnnnnnnnnnnnnnnnnnnnnnnnnnnnnnnnnnnnnnnnnnnnnnnnnnnnnnnnnnnnnnnnnnnnnnnnnnnnnnnnnnnnnnnnnnnnnnnnnnnnnnnnnnnnnnnnnnnnnnnnnnnnnnnnnnnnnnnnnnnnnnnnnnnnnnnnnnnnnnnnnnnnnnnnnnnnnnnnnnnnnnnnnnnnnnnnnnnnnnnnnnnnnnnnnnnnnnnnnnnnnnnnnnnnnnnnnnnnnnnnnnnnnnnnnnnnnnnnnnnnnnnnnnnnnnnnnnnnnnnnnnnnnnnnnnnnnnnnnnnnnnnnnnnnnnnnnnnnnnnnnnnnnnnnnnnnnnnnnnnnnnnnnnnnnnnnnnnnnnnnnnnnnnnnnnnnnnnnnnnnnnnnnnnnnnnnnnnnnnnnnnnnnnnnnnnnnnnnnnnnnnnnnnnnnnnnnnnnnnnnnnnnnnnnnnnnnnnnnnnnnnnnnnnnnnnnnnnnnnnnnnnnnnnnnnnnnnnnnnnnnnnnnnnnnnnnnnnnnnnnnnnnnnnnnnnnnnnnnnnnnnnnnnnnnnnnnnnnnnnnnnnnnnnnnnnnnnnnnnnnnnnnnnnnnnnnnnnnnnnnnnnnnnnnnnnnnnnnnnnnnnnnnnnnnnnnnnnnnnnnnnnnnnnnnnnnnnnnnnnnnnnnnnnnnnnnnnnnnnnnnnnnnnnnnnnnnnnnnnnnnnnnnnnnnnnnnnnnnnnnnnnnnnnnnnnnnnnnnnnnnnnnnnnnnnnnnnnnnnnnnnnnnnnnnnnnnnnnnnnnnnnnnnnnnnnnnnnnnnnnnnnnnnnnnnnnnnnnnnnnnnnnnnnnnnnnnnnnnnnnnnnnnnnnnnnnnnnnnnnnnnnnnnnnnnnnnnnnnnnnnnnnnnnnnnnnnnnnnnnnnnnnnnnnnnnnnnnnnnnnnnnnnnnnnnnnnnnnnnnnnnnnnnnnnnnnnnnnnnnnnnnnnnnnnnnnnnnnnnnnnnnnnnnnnnnnnnnnnnnnnnnnnnnnnnnnnnnnnnnnnnnnnnnnnnnnnnnnnnnnnnnnnnnnnnnnnnnnnnnnnnnnnnnnnnnnnnnnnnnnnnnnnnnnnnnnnnnnnnnnnnnnnnnnnnnnnnnnnnnnnnnnnnnnnnnnnnnnnnnnnnnnnnnnnnnnnnnnnnnnnnnnnnnnnnnnnnnnnnnnnnnnnnnnnnnnnnnnnnnnnnnnnnnnnnnnnnnnnnnnnnnnnnnnnnnnnnnnnnnnnnnnnnnnnnnnnnnnnnnnnnnnnnnnnnnnnnnnnnnnnnnnnnnnnnnnnnnnnnnnnnnnnnnnnnnnnnnnnnnnnnnnnnnnnnnnnnnnnnnnnnnnnnnnnnnnnnnnnnnnnnnnnnnnnnnnnnnnnnnnnnnnnnnnnnnnnnnnnnnnnnnnnnnnnnnnnnnnnnnnnnnnnnnnnnnnnnnnnnnnnnnnnnnnnnnnnnnnnnnnnnnnnnnnnnnnnnnnnnnnnnnnnnnnnnnnnnnnnnnnnnnnnnnnnnnnnnnnnnnnnnnnnnnnnnnnnnnnnnnnnnnnnnnnnnnnnnnnnnnnnnnnnnnnnnnnnnnnnnnnnnnnnnnnnnnnnnnnnnnnnnnnnnnnnnnnnnnnnnnnnnnnnnnnnnnnnnnnnnnnnnnnnnnnnnnnnnnnnnnnnnnnnnnnnnnnnnnnnnnnnnnnnnnnnnnnnnnnnnnnnnnnnnnnnnnnnnnnnnnnnnnnnnnnnnnnnnnnnnnnnnnnnnnnnnnnnnnnnnnnnnnnnnnnnnnnnnnnnnnnnnnnnnnnnnnnnnnnnnnnnnnnnnnnnnnnnnnnnnnnnnnnnnnnnnnnnnnnnnnnnnnnnnnnnnnnnnnnnnnnnnnnnnnnnnnnnnnnnnnnnnnnnnnnnnnnnnnnnnnnnnnnnnnnnnnnnnnnnnnnnnnnnnnnnnnnnnnnnnnnnnnnnnnnnnnnnnnnnnnnnnnnnnnnnnnnnnnnnnnnnnnnnnnnnnnnnnnnnnnnnnnnnnnnnnnnnnnnnnnnnnnnnnnnnnnnnnnnnnnnnnnnnnnnnnnnnnnnnnnnnnnnnnnnnnnnnnnnnnnnnnnnnnnnnnnnnnnnnnnnnnnnnnnnnnnnnnnnnnnnnnnnnnnnnnnnnnnnnnnnnnnnnnnnnnnnnnnnnnnnnnnnnnnnnnnnnnnnnnnnnnnnnnnnnnnnnnnnnnnnnnnnnnnnnnnnnnnnnnnnnnnnnnnnnnnnnnnnnnnnnnnnnnnnnnnnnnnnnnnnnnnnnnnnnnnnnnnnnnnnnnnnnnnnnnnnnnnnnnnnnnnnnnnnnnnnnnnnnnnnnnnnnnnnnnnnnnnnnnnnnnnnnnnnnnnnnnnnnnnnnnnnnnnnnnnnnnnnnnnnnnnnnnnnnnnnnnnnnnnnnnnnnnnnnnnnnnnnnnnnnnnnnnnnnnnnnnnnnnnnnnnnnnnnnnnnnnnnnnnnnnnnnnnnnnnnnnnnnnnnnnnnnnnnnnnnnnnnnnnnnnnnnnnnnnnnnnnnnnnnnnnnnnnnnnnnnnnnnnnnnnnnnnnnnnnnnnnnnnnnnnnnnnnnnnnnnnnnnnnnnnnnnnnnnnnnnnnnnnnnnnnnnnnnnnnnnnnnnnnnnnnnnnnnnnnnnnnnnnnnnnnnnnnnnnnnnnnnnnnnnnnnnnnnnnnnnnnnnnnnnnnnnnnnnnnnnnnnnnnnnnnnnnnnnnnnnnnnnnnnnnnnnnnnnnnnnnnnnnnnnnnnnnnnnnnnnnnnnnnnnnnnnnnnnnnnnnnnnnnnnnnnnnnnnnnnnnnnnnnnnnnnnnnnnnnnnnnnnnnnnnnnnnnnnnnnnnnnnnnnnnnnnnnnnnnnnnnnnnnnnnnnnnnnnnnnnnnnnnnnnnnnnnnnnnnnnnnnnnnnnnnnnnnnnnnnnnnnnnnnnnnnnnnnnnnnnnnnnnnnnnnnnnnnnnnnnnnnnnnnnnnnnnnnnnnnnnnnnnnnnnnnnnnnnnnnnnnnnnnnnnnnnnnnnnnnnnnnnnnnnnnnnnnnnnnnnnnnnnnnnnnnnnnnnnnnnnnnnnnnnnnnnnnnnnnnnnnnnnnnnnnnnnnnnnnnnnnnnnnnnnnnnnnnnnnnnnnnnnnnnnnnnnnnnnnnnnnnnnnnnnnnnnnnnnnnnnnnnnnnnnnnnnnnnnnnnnnnnnnnnnnnnnnnnnnnnnnnnnnnnnnnnnnnnnnnnnnnnnnnnnnnnnnnnnnnnnnnnnnnnnnnnnnnnnnnnnnnnnnnnnnnnnnnnnnnnnnnnnnnnnnnnnnnnnnnnnnnnnnnnnnnnnnnnnnnnnnnnnnnnnnnnnnnnnnnnnnnnnnnnnnnnnnnnnnnnnnnnnnnnnnnnnnnnnnnnnnnnnnnnnnnnnnnnnnnnnnnnnnnnnnnnnnnnnnnnnnnnnnnnnnnnnnnnnnnnnnnnnnnnnnnnnnnnnnnnnnnnnnnnnnnnnnnnnnnnnnnnnnnnnnnnnnnnnnnnnnnnnnnnnnnnnnnnnnnnnnnnnnnnnnnnnnnnnnnnnnnnnnnnnnnnnnnnnnnnnnnnnnnnnnnnnnnnnnnnnnnnnnnnnnnnnnnnnnnnnnnnnnnnnnnnnnnnnnnnnnnnnnnnnnnnnnnnnnnnnnnnnnnnnnnnnnnnnnnnnnnnnnnnnnnnnnnnnnnnnnnnnnnnnnnnnnnnnnnnnnnnnnnnnnnnnnnnnnnnnnnnnnnnnnnnnnnnnnnnnnnnnnnnnnnnnnnnnnnnnnnnnnnnnnnnnnnnnnnnnnnnnnnnnnnnnnnnnnnnnnnnnnnnnnnnnnnnnnnnnnnnnnnnnnnnnnnnnnnnnnnnnnnnnnnnnnnnnnnnnnnnnnnnnnnnnnnnnnnnnnnnnnnnnnnnnnnnnnnnnnnnnnnnnnnnnnnnnnnnnnnnnnnnnnnnnnnnnnnnnnnnnnnnnnnnnnnnnnnnnnnnnnnnnnnnnnnnnnnnnnnnnnnnnnnnnnnnnnnnnnnnnnnnnnnnnnnnnnnnnnnnnnnnnnnnnnnnnnnnnnnnnnnnnnnnnnnnnnnnnnnnnnnnnnnnnnnnnnnnnnnnnnnnnnnnnnnnnnnnnnnnnnnnnnnnnnnnnnnnnnnnnnnnnnnnnnnnnnnnnnnnnnnnnnnnnnnnnnnnnnnnnnnnnnnnnnnnnnnnnnnnnnnnnnnnnnnnnnnnnnnnnnnnnnnnnnnnnnnnnnnnnnnnnnnnnnnnnnnnnnnnnnnnnnnnnnnnnnnnnnnnnnnnnnnnnnnnnnnnnnnnnnnnnnnnnnnnnnnnnnnnnnnnnnnnnnnnnnnnnnnnnnnnnnnnnnnnnnnnnnnnnnnnnnnnnnnnnnnnnnnnnnnnnnnnnnnnnnnnnnnnnnnnnnnnnnnnnnnnnnnnnnnnnnnnnnnnnnnnnnnnnnnnnnnnnnnnnnnnnnnnnnnnnnnnnnnnnnnnnnnnnnnnnnnnnnnnnnnnnnnnnnnnnnnnnnnnnnnnnnnnnnnnnnnnnnnnnnnnnnnnnnnnnnnnnnnnnnnnnnnnnnnnnnnnnnnnnnnnnnnnnnnnnnnnnnnnnnnnnnnnnnnnnnnnnnnnnnnnnnnnnnnnnnnnnnnnnnnnnnnnnnnnnnnnnnnnnnnnnnnnnnnnnnnnnnnnnnnnnnnnnnnnnnnnnnnnnnnnnnnnnnnnnnnnnnnnnnnnnnnnnnnnnnnnnnnnnnnnnnnnnnnnnnnnnnnnnnnnnnnnnnnnnnnnnnnnnnnnnnnnnnnnnnnnnnnnnnnnnnnnnnnnnnnnnnnnnnnnnnnnnnnnnnnnnnnnnnnnnnnnnnnnnnnnnnnnnnnnnnnnnnnnnnnnnnnnnnnnnnnnnnnnnnnnnnnnnnnnnnnnnnnnnnnnnnnnnnnnnnnnnnnnnnnnnnnnnnnnnnnnnnnnnnnnnnnnnnnnnnnnnnnnnnnnnnnnnnnnnnnnnnnnnnnnnnnnnnnnnnnnnnnnnnnnnnnnnnnnnnnnnnnnnnnnnnnnnnnnnnnnnnnnnnnnnnnnnnnnnnnnnnnnnnnnnnnnnnnnnnnnnnnnnnnnnnnnnnnnnnnnnnnnnnnnnnnnnnnnnnnnnnnnnnnnnnnnnnnnnnnnnnnnnnnnnnnnnnnnnnnnnnnnnnnnnnnnnnnnnnnnnnnnnnnnnnnnnnnnnnnnnnnnnnnnnnnnnnnnnnnnnnnnnnnnnnnnnnnnnnnnnnnnnnnnnnnnnnnnnnnnnnnnnnnnnnnnnnnnnnnnnnnnnnnnnnnnnnnnnnnnnnnnnnnnnnnnnnnnnnnnnnnnnnnnnnnnnnnnnnnnnnnnnnnnnnnnnnnnnnnnnnnnnnnnnnnnnnnnnnnnnnnnnnnnnnnnnnnnnnnnnnnnnnnnnnnnnnnnnnnnnnnnnnnnnnnnnnnnnnnnnnnnnnnnnnnnnnnnnnnnnnnnnnnnnnnnnnnnnnnnnnnnnnnnnnnnnnnnnnnnnnnnnnnnnnnnnnnnnnnnnnnnnnnnnnnnnnnnnnnnnnnnnnnnnnnnnnnnnnnnnnnnnnnnnnnnnnnnnnnnnnnnnnnnnnnnnnnnnnnnnnnnnnnnnnnnnnnnnnnnnnnnnnnnnnnnnnnnnnnnnnnnnnnnnnnnnnnnnnnnnnnnnnnnnnnnnnnnnnnnnnnnnnnnnnnnnnnnnnnnnnnnnnnnnnnnnnnnnnnnnnnnnnnnnnnnnnnnnnnnnnnnnnnnnnnnnnnnnnnnnnnnnnnnnnnnnnnnnnnnnnnnnnnnnnnnnnnnnnnnnnnnnnnnnnnnnnnnnnnnnnnnnnnnnnnnnnnnnnnnnnnnnnnnnnnnnnnnnnnnnnnnnnnnnnnnnnnnnnnnnnnnnnnnnnnnnnnnnnnnnnnnnnnnnnnnnnnnnnnnnnnnnnnnnnnnnnnnnnnnnnnnnnnnnnnnnnnnnnnnnnnnnnnnnnnnnnnnnnnnnnnnnnnnnnnnnnnnnnnnnnnnnnnnnnnnnnnnnnnnnnnnnnnnnnnnnnnnnnnnnnnnnnnnnnnnnnnnnnnnnnnnnnnnnnnnnnnnnnnnnnnnnnnnnnnnnnnnnnnnnnnnnnnnnnnnnnnnnnnnnnnnnnnnnnnnnnnnnnnnnnnnnnnnnnnnnnnnnnnnnnnnnnnnnnnnnnnnnnnnnnnnnnnnnnnnnnnnnnnnnnnnnnnnnnnnnnnnnnnnnnnnnnnnnnnnnnnnnnnnnnnnnnnnnnnnnnnnnnnnnnnnnnnnnnnnnnnnnnnnnnnnnnnnnnnnnnnnnnnnnnnnnnnnnnnnnnnnnnnnnnnnnnnnnnnnnnnnnnnnnnnnnnnnnnnnnnnnnnnnnnnnnnnnnnnnnnnnnnnnnnnnnnnnnnnnnnnnnnnnnnnnnnnnnnnnnnnnnnnnnnnnnnnnnnnnnnnnnnnnnnnnnnnnnnnnnnnnnnnnnnnnnnnnnnnnnnnnnnnnnnnnnnnnnnnnnnnnnnnnnnnnnnnnnnnnnnnnnnnnnnnnnnnnnnnnnnnnnnnnnnnnnnnnnnnnnnnnnnnnnnnnnnnnnnnnnnnnnnnnnnnnnnnnnnnnnnnnnnnnnnnnnnnnnnnnnnnnnnnnnnnnnnnnnnnnnnnnnnnnnnnnnnnnnnnnnnnnnnnnnnnnnnnnnnnnnnnnnnnnnnnnnnnnnnnnnnnnnnnnnnnnnnnnnnnnnnnnnnnnnnnnnnnnnnnnnnnnnnnnnnnnnnnnnnnnnnnnnnnnnnnnnnnnnnnnnnnnnnnnnnnnnnnnnnnnnnnnnnnnnnnnnnnnnnnnnnnnnnnnnnnnnnnnnnnnnnnnnnnnnnnnnnnnnnnnnnnnnnnnnnnnnnnnnnnnnnnnnnnnnnnnnnnnnnnnnnnnnnnnnnnnnnnnnnnnnnnnnnnnnnnnnnnnnnnnnnnnnnnnnnnnnnnnnnnnnnnnnnnnnnnnnnnnnnnnnnnnnnnnnnnnnnnnnnnnnnnnnnnnnnnnnnnnnnnnnnnnnnnnnnnnnnnnnnnnnnnnnnnnnnnnnnnnnnnnnnnnnnnnnnnnnnnnnnnnnnnnnnnnnnnnnnnnnnnnnnnnnnnnnnnnnnnnnnnnnnnnnnnnnnnnnnnnnnnnnnnnnnnnnnnnnnnnnnnnnnnnnnnnnnnnnnnnnnnnnnnnnnnnnnnnnnnnnnnnnnnnnnnnnnnnnnnnnnnnnnnnnnnnnnnnnnnnnnnnnnnnnnnnnnnnnnnnnnnnnnnnnnnnnnnnnnnnnnnnnnnnnnnnnnnnnnnnnnnnnnnnnnnnnnnnnnnnnnnnnnnnnnnnnnnnnnnnnnnnnnnnnnnnnnnnnnnnnnnnnnnnnnnnnnnnnnnnnnnnnnnnnnnnnnnnnnnnnnnnnnnnnnnnnnnnnnnnnnnnnnnnnnnnnnnnnnnnnnnnnnnnnnnnnnnnnnnnnnnnnnnnnnnnnnnnnnnnnnnnnnnnnnnnnnnnnnnnnnnnnnnnnnnnnnnnnnnnnnnnnnnnnnnnnnnnnnnnnnnnnnnnnnnnnnnnnnnnnnnnnnnnnnnnnnnnnnnnnnnnnnnnnnnnnnnnnnnnnnnnnnnnnnnnnnnnnnnnnnnnnnnnnnnnnnnnnnnnnnnnnnnnnnnnnnnnnnnnnnnnnnnnnnnnnnnnnnnnnnnnnnnnnnnnnnnnnnnnnnnnnnnnnnnnnnnnnnnnnnnnnnnnnnnnnnnnnnnnnnnnnnnnnnnnnnnnnnnnnnnnnnnnnnnnnnnnnnnnnnnnnnnnnnnnnnnnnnnnnnnnnnnnnnnnnnnnnnnnnnnnnnnnnnnnnnnnnnnnnnnnnnnnnnnnnnnnnnnnnnnnnnnnnnnnnnnnnnnnnnnnnnnnnnnnnnnnnnnnnnnnnnnnnnnnnnnnnnnnnnnnnnnnnnnnnnnnnnnnnnnnnnnnnnnnnnnnnnnnnnnnnnnnnnnnnnnnnnnnnnnnnnnnnnnnnnnnnnnnnnnnnnnnnnnnnnnnnnnnnnnnnnnnnnnnnnnnnnnnnnnnnnnnnnnnnnnnnnnnnnnnnnnnnnnnnnnnnnnnnnnnnnnnnnnnnnnnnnnnnnnnnnnnnnnnnnnnnnnnnnnnnnnnnnnnnnnnnnnnnnnnnnnnnnnnnnnnnnnnnnnnnnnnnnnnnnnnnnnnnnnnnnnnnnnnnnnnnnnnnnnnnnnnnnnnnnnnnnnnnnnnnnnnnnnnnnnnnnnnnnnnnnnnnnnnnnnnnnnnnnnnnnnnnnnnnnnnnnnnnnnnnnnnnnnnnnnnnnnnnnnnnnnnnnnnnnnnnnnnnnnnnnnnnnnnnnnnnnnnnnnnnnnnnnnnnnnnnnnnnnnnnnnnnnnnnnnnnnnnnnnnnnnnnnnnnnnnnnnnnnnnnnnnnnnnnnnnnnnnnnnnnnnnnnnnnnnnnnnnnnnnnnnnnnnnnnnnnnnnnnnngaattctgagaaacttcctttgaatgtgtgcattcatctcacagtgttgaaccattcttttgattgagcaacttcgaaacagtcattttgtagaatattcaaaggaatatttgtgagcccattgagggctctggggaaataggaaatatcttcacataaaaactagacagcagcattctgagaaacgtctttgtgatgtctgcattcatctcacagatttgaacattttttttgattgagcagtcttgaaacactctgtttgtagaatctgcaagtggatatttggagtgcttagaggcctattgtggaaaaggaaatatcttcacataaaaactagatacaatcattctgaggaacttctttgtgatgtgggctttcatctcacagagttgaaactttcttttcattgagccgtttggaaacagtctttttgtagaatctgcaaatggatatttggagcagtttgtggcctatggtgaaaaaggaaatataaaaaccggattgaaggttgctgagaaacttctttgagatgtgtgcattcatctcacaaagttcaataattctttttattgagcagtttggaaacagtctttttgtagaatctacaaagagatatttgtgagggctttgaggtctatggtgaaaaaggaaatatcttcacagaaaaactataaagaaggtttctgagaaacttctttgtgatgtgtgcattcatctcacacatttcaacctttcttttgattgagcagtttggaaacagtcttttttaatattcttcaagtggatatttgtgagcactttgaggctcatggtgaaaaaagaaacattcacataaaaacttaatagaagctttctgagaaacttctttttgatgtgtgcattcatctcacagagttgaacctttcttttgatgagcactgtggaaacagactttttgtagaatctgcaaagggacaattttgagcgctttgcttccagtggtgaaaaaggaaataccttcacataaaaactagacagaatgtttctgagaaactgctttgtgatatgtgcattcatctcccagatgtgtctgtttcttttctttttttttttttttttttttgagacggagtctcgctgtcgcccaggctggagtgcagtggcgcaatctcggctcactgcaggctctgccccctgaggttcacgccattctcctgcctcagcctcccgagtagctgggactacaggcgcccgccacctcgcccggctaattttttgtatttttagtagagacggggtttcaccgtgttagccaggatggtctcgatctcctgacctcgtgatctgcccgcctcagcctcccaaagtgctgggattacagggatgagccaccgcgcccggccgtgtctgtttcttttcattgagaagatcggaaactcttttcttgtaaaatctgcaaagggatatttgtgagcccttgaaggcgtatggtgaaaaaggaaatatcttcacataaaaactacacagaagctttctgagaaacattgtggtgatgtgagcattcatctcacagagttgaaacattcttttgtttgagcagtgtgtaacgagtctttttgtggaatctgcaaagggatatttgtgaatgctttgaggcctatggtgaaaaaggaaatatcttcacataaaaactagagagaagctttctgagaaacctctttgtggtgtgcatgcatctcacagagttgaacctttcttttgattgagcaatttagaaaaagtagttttgtagaatctgtaaagggatatttgtgaacactttgaggcctatggtgaaaaagcaagtatcttcacataaaatctagacagaagcattctgagaaacttctttgtgatgtgtgcattcatcacacagagctgaacctttgttttgattgagcagtttggtaactgtctttttgtagaatctgcaaatggatatttggagcgctttgaggcctatggtgaaaaaggaaatatattcacataaaaactagactgaaggttcctgagaaacttctttgagatgtgtgcactcatcacacagtgttcaaaaattctttttattgagtggtttggaaacagtctttttgtagaatctgcaaatggatatttggagcgctttgaggcctatggtgaaaaaggaaatatattcacataaaaactagactgaaggttcctgagaaacttctttgagatgtgtgcactcatctcacagtgttcaaaaattctttttattgagcagtttggaaaaagtctttttgtacaatctgcaaacggatatttaggagcgcattgaggcctatggtgaaaaaggaaatatcttcacattaaaaactagaaagaagcattctgagaagctgctttaagatatgtgtatattcatctcacaaaggtaaacgttacttttttttgagcagtttgtaaactctgttattctagaatctgcaaagggaaatttttgagtgctttgagacccacgatgaaaaaggaactatcttcacataaaaactagtgagaagcttgctgagaaactactttctgatgtgtgcattcatctaacagagttgaaactttcttttgattgagcagtttggaaatagtctttttgtagtttctgcaaaggcatatttgggagtgagttgaggcctatgttcaaaaaagaaatatcttcacataaaaacgagaaggaagttttctgggaaacttctttgtgatgtgcacattcgtctcacagggttgaaccactctgtttattgagcagtttggaaacagtcttttcatagaatctgcaaagggatatctgggagaacattgaggcatatggtggaaaaggaaatatcttcacataaaaagtagaaagaaattttctgagtagttcctttgtgacgtgtgcattcatcacacagaagtaaaatttcttaccattgagcagttagtttttatgtgaagatatttccgttttcaacatagacctcaaaccgcctacatatatccctttgcagattctataaaaagactgtttccaaaaggctcaaagaaagcttccactctgcaagatgaatgcacacatcacagagaagtttctcagaaagtttctgtctagtttttatttgttgatactccctttttcaccataggcctcaaactgctcataaataaccctttgcatattctacaaaaagactgtttccaaactactcaatcaaaagaaaggttcaaatctgtgaggtgaatgcacatatcacaaaaaaagtttctcagaaagcttctatctagcttttatttgaagatgtttcctttttcaatgtaggcctcaaagtgctcacaaatgtccctttataggttttacaaaaagactgattccaaactgctcaaccaaaacaaagctccaactctttgatatgaatgcacacatcacaaagaagtttctcagaaagcttctgtccagtttttatgtgaagatatttcctttttcaccataagtctcaacacattcaaattatcactttgaagattctacaaaaagacattttccaacctgctctatctaaaaaaaggttcaactctgtgagaagaatgcacacataaaaaagaagtttctcagaatgcttctgtctagtttttatgtgaagacatttcctttttcaccataggccaaaaagggatcccaaatatccctttgtacattctacaaaaggactgtttcctaactgctcaatccaaagacaggttcaactctttgggatgaatgcacacatcacaacgaagtttctcagaaagcttctgtctagtttttgtgtgaagacatttcttttttcactgtaggcttcaaagggctcacaaatatcgcaaagcagattctacaaaaagactctatccaaattggtcaatgaaaagaacacttcaaatctgtgagatgaatgatcacatcacaaagaattttctcagaaaacttctgtctagtttttatgtgaagatattaccgttttcaccacagacctgaaactgcctacatatatccctttgcaaattctacaaaaagattgtttccaaactgttcaatcaaagaaagcttctactctgtgagatgaatgcagacatcacagagaagtttctcagaaagtttctgtctagttcttatttgtcaatactccctttttcaccacaggcctcaaactgctcataaataatcctttgcagattctacaaaaggactgtttccaaactgctcaatcaaacgaaacttcagctgtgtgagatgaatgcacacatcacaaagaagtttctcagaacgtttctgtctagtttttatgtgaagatacttctttttcaccataaacctcaaagcgttcacaaattttcctttgcagattctatgaaaagactgtttccaaagtgctcaatcaaaagaaacattcaactctgtgtgatgaatgcacacatcacaaagaagtttctcagaaggcttctgtctagattttatttttggatatttcctttttcacaataggcctcaaaaaactcacaaatatccctttgcatatgctacaaaaagactgttttcaaactgctcaatgaaagaaaattcaactctgtgagatgaatgcatacatcacaaagtgatttctcagaatgcttctctctagtttttatatgaagatatttattttttcaccacatgcctcaaactgctcaaaaacatccctttgccgattctccaaaaagactgtttccgaactgctcaatcaaaagaaagattaaactctttgagatgcatacacccatcacaaagaagtttcccagaaaacatgagtctagtttttacgtgaagatatttcctttttcaccataagcctcaaagcattcacaaatatcactttgcagcttctacgaaaagactgtttccaaactgctcaatcaaaagaaagtttcaaccctgtgagatgaatgcacacatcacaaagaagtttttcagaaagctgctgtctacattttatttttcgatatttcctttttcaccataggactcaaactgctgaaatatatcactttgcagattctacaaaaagacagtttccaaactgcccaatgaaaagaaaggttcaactctctgaaatgaatgcacacatcacaaagaagtttctcagaatgcttctctctaggttttatgtgaagatatttcctttttcacctcagacctcaaaccactcataaatatccctttgcatattctacaaaaagattgtttccaacccaataagtcagaagaaagtttcaactctgtgaaatgaatacacacatcacaaggaagttgctcagaaagattctgtctagtttttatgtgaagatatttcctttttcaccatatgcctcaaaacgccttcaaatatccctttacagattctacaaaaagactgtttttgagctgatgaatcaaaacaaatattcaactatgtgagatgaatgcatacatcctaaactagtttctcagaaagcttctctataggtttaggtgaagatatttcctttttcaccataagcctgagagcgttcacagatatcactttgcagattgtacaaaaagactgtttaaaaactgctcaatcaaaataaaagttcaactatgtgagatgaatgcacacatcacaaagaagtttctcagaaagcttctgtttagattttacttgtggataattcctttttcaccataggtctcaaaccactcacaaatattccttgcagtttctaaaaaagactgtttccaaactactcaatcaaaagaaaggttcaactctgtgaggtgaacacacacatcacaaagaagtttctcagaaagcttctgtctagtttttatgtgaagataattccttttacaacataggcctcaatgggctcacaaatatccctatgcagattctacaaaaagactgcttccaaactgctcaatcaaaagaaagattcaactttgtgcatttaatgaacacatcacaaagatgtttctcagaatccttctgtctagtttttatgtgaagatatctcctttttcaccatagttctcaaacctctcacaaatatccctctgcagattttcaaaaagattgtttccagagtgctcaatcaaaagaaagattcacatctgttaaatgaatgcacacatcagaaagaagtttctcaaaatgtttctgtctagttttaatgtgaagatatttcctttttaactttagtccacaaaccgctcacaaatatccctctgcatattctacaaaaagactgtttccaaactgctcaatcaaaagaaagtttcaactccgtgagatgaattcacaaatcacaaagaagtttctcagaaagcttctgtctagtttttatgtgaagatatttcctttttcaccataggcctcaaagcccacaaaatatccttttgcagattctacaaaaagactgtttccaaactgctcagtcaaaacaaaggttcaactctgtgagatgaacacacatatcacaaagaagttactcagaaagtttctgacaagtttttatgtgaagatatttcctatttcaccataggcctcaaagggctcacaaatatcccatttcagattctgcaaaaacactgtttgcaaactgcttaatgaaaacaaaagttaatctctgtgagatgaatgcacacatcacaaagaactttctcagaatgcttctctctagtctttatgtgaagatagttcctttttcaccataggcctcaaactgctcaaaaatatccctctgtagatcctacaaaaaaattgtttccaaactgctcaatctaaagaaagtttcaactctgtgagatgaatgtacacatcagaaagaagtttgtcagaaagcttctgtctagtttttatttgaagacacttcctatttcaccttaggatcaaattgctccaaatatccatttgcattttctacaaaaaagagtgtttccaaactgctctatcaaaagaaaggttcaactctgtgagatgaatgcacacatcacaaagaagtttctcagaatgcttctgtctagtttttatgtgagcacatttcctttttcaacataggccttaaactacttacaaatatctctctgcagatactcaaaacagactgtttccaaactgctcaatcaaaataaatgttcaactctgtgagatgaatgcacacacaacacagaagtttctcggaagacttctgtctagtttttatgtgaagatatttcctgtttcaacagaggcttcaattggttcagaaatatctttttgcaggttatacaaaaggattgtttccaaacagctcaatcaaaagaaaggttcaaatccgtgtgatgaataaacacattacgaaattttcagaatgcttctgtctagtttttatgtgatgatatttcttcatctccataggcctcaaaatgctcagatatataccactgcagatactacaaaaagactgtttccaatctgctaaatcaaaagaaaagttctgctctgtgagatgaaagcacacatcataaggaagtttcccagaatgcttctgtctagttttctgtgaagatatttcctttttcaccataggctgcaaaccattcacaaatatccctatgcagttagtacaaaaagactgtttctgaattgtgcattcataagaaaggttctacactgtgagagtaatacacatgtcagaaagaagtttctcagaatgttctgtctagtttttatgtgaagatatttcctatttcaccttagtcctcaaagggctgacaaatacccctttgcagattctacaataagactttttccaaactgatcaacgaaaagaaaggttcaactctgatcaaggaatggacaccacacaaagaagtttctcagagtgcatctgtctagttattatgtgaagacatttgtttttcaccataggcctcaaacagctcagaaatatcccgttgcagattgtacaaaaagactgtttccaaactgctcaatcaaaacaaaggtttgacactgtgaaatgaatacactcatcacaaagacgtttctcagaatgcttctgtttagtttttatgtgaagatatttcctttttcaccataggcctcaaagcactccaaatatccatttgtagattctacaaaaagagtgtttctaaactgctcaatcaaaaggaagattcaactctgtgagatgaatgcaaacatcataaagtagtttctcagaatgcttctgtctagtttttatgtgaagatatttcctttttcaccataggccttaaactgctcacaaatatgcctctgcagatactacaaaaagactgtttccaaactgctcaatcaaaagaaaggttcgactctgtgagatgaaagcacaaatcacaaagaagttactcagaatgcttctttttagtttttctgtgaaggtatttcctattacaccatgggcctcaaagggctcacaaatatccctttgcagattctacaaaaagactgttacagaactgctcaatgaaaactaagtttcaactctgtgagataaatgcacacctaaaaaagaagtttctcagaatgcttctgtctagtttttatgtgaagatatttctttttcatcataggcctcaaaccgctcagaaatatccctatgcagattttacaaaaagactgtttccaaactgtttaatgaaaagaaagattatactctgtaagatgaaagcacacattaaaaagaattgtctcagaaagtttctatctagtttatatgtgaagatatttcctctttcatcataggcctcaaagggctcaaaaatatcccttttcagatactacaaaaggcctctttccaaactgctcaatcaaaagaaagtttcaactctgtgagatgaaagcacacatcacaaataagtttctcagaatgtttgtctagttgttaagtgaagatatttcctatttcactataggccataaagggatcacaaatatccctttgcagaatctacaaaaagactgtttccaaacagctcaattaaaacaaaggttcaactgtatgagatgaatggacacatcacaaagtagtttctcagaaagcttctgtctagtttttatgggaagatatgtctttttcaccataagcctcagatggctaaggaatatccctttacagattgcacaaaaagactgtttccaaattgctcaatgaaaagaaaggttcaaatgtgtgagatgaatgcacacatcataaagaagtttctcagaatggttctgtctagtttttatgtgaagatattttctttttcaccataggccttaaaccgctcccaaatatccctctgcagatactacaaaaaggctgcttgaaaactgctcaatcaaaagaaactttcaactctgtgagatgactgcacacgtcacaaagaagtttctcaaaatgcttttgtctagtttttatgtgaagagatttcctttttcaccacaggcctcaaagtgctccaaatatccatttgcagattctacaaaaagactgtttccgaacagctacatgaaaagaaaggttcaactctgtgagataaatgcacacatgaaaaagaggtttctcagaatgcttctggctagtttttatctgtcatatttgtttttctccataggcctcaaaccattcagaaatatccctttacatattgtacaaaaagactgtttccaaactgtcaaatgaaaagaaaggttcaactctatgagatgaacgcaaacatcacaaagaagtttctcagaaagtttctatctagtttttatgtgaagatagttccttcttcacaataggctcaaagcgcctcaaatatcaatttgcagattctacaaaaagactgtttccaaaccgctcaatcaaaagaaaggttcaactctgtgagatgaatgcacacatcacaaagaagtttttcagaaaggttctgtttagttttatgtgaagatatttcctttttcaacataggcttcaaagcactccacacatccatttgcagattctacaaaaagagtgtttccaaactgctcaatcaaaaataatgttcaactctgtgagatgaaaacacacatcataaagaagtttctcataatgcttctgtctagtttttatgtgaagatatttcgtatttcaccataggcatcaaagagctcacaaatatccccttgcagactctacaaaaagactgtttttgaactgctccatgcaaagaaagtttcaactctgtgagacaaatgtacacataaaaaagcagtttgtcagaatgcttctgtctagtatttatatgtagatatttctttttcaacataggcatcaaaccgttcagaaatatccctttgtagattgtacaaaaagactgtttccaaactgctcaattaaaagaaatgttcaacactgtgagatgaatgcacacatcacaaagaagtttctcagaatgcttctgtctagtttttatatgaagatatttctttatcaccataggcctcaaacccctcagaaatatcccttttcagattgtagaaaaagactgtttcctaactgctcaatctaaaggatggttcaactctgtgagatgaaagcacacatcacaaagaagtttctcagaaagcttctgtctagtttttatgtgaagatacttcccttctaacaataggcctcagagtgatccaaatatcgatttgcagattctacaaaagactgtttccaaactgctcaataaaaagaaatttttaactctgtgagatgaaagcatacatcacaaagaagttactcagacagcttctgtctagtttttatgtgaagatatttcctatttcatctgaggccacaaaggactcacaaatatcactttgcagattctataaaaagactttttccaaattgctcaatcaaaagaaaggttcaactctgtgagatgaatggacacatcacaaagaagtttctcataatgctactgtctacttttcatgtgaagatatttctctttcaccataggactctaatggctctgaaatatccctttccatattgtacaataatactctttccaaaatgctcaatcaaaagtaacattcaactctgtcagatgaatgtagacatcacaaacaagtttctcagaaagtttctgtttagtttttatgtgaagatatttcttttttcaccatgggcctcaaagtgctccaaatatccatttacggattctacaaaaagagtctttctaaactgctcaaataaaagacactttcaactttgtgaaatgaaagcacacatcacaaagaagtttcttagaaagcttctgtctagttattatgtgaagatattttgtatttcaccattggcctcaatgggctcagaaatatcccttttcatattctacaaaaggactgtttccaaactgctcaaactaaagaaagattcaactctgtgagatgaatgcacacatcacaaaagtttctcagaatgcttctgtctagttttcatgtgaagatatttcctttttcaccataggcctcaaactgctcacaaatatccccctgcagatactacaaaaaagactgtttccaaactgctcaatcaaaataaatgttcaactctgtgagacgaatgcacacgtcacaaagaagtttcagagaatgcttctgtctacttcttatgtgaatataattcatttttcacgataggcctcaaaactctccaaatatctatttgcagattccagaaaacgaatgcttccaaactgctcaatcaaaagaaagtttcaactctttgagatgaaagcacacatcacaaagaagtttcttagaaagattctgtctagttgttatgtgaagatatttcatatttcaccataggcctcaatggttcagaaatatccctttgcaggttctacaaaaggactctttccaaactgctcactccaaagaaattttcaactctgttatatgaattcacacatcacaaaatttctcagaatgcttctgcctagattttatgtgtagatatttcctttctcaccataggtgtcaaactgctcacaaatatccctctgcagatactataaaaagactgtttccaacctgctcaatcaaaagaaagattcaactatgtgagacaaatgcacacgacacaaagaagtttctcagaaagcttctgtctactttttatgtgaatataattcctttttcaacatagggctgaaagctctccaaatatccctttgcagattctacaaaaagactttttccaaactactcaatcaaaacaaagattcaacccagtgagatgaatgcacacatcacaaagtagtttatcagaatgcttctgtctagtttttatgtgaagatatttctttttcaacacaggcctcaaatgactcagaaatatccctttgcagattgtccaaaaagactctttccaaactgctcaatcaaagaaaaggttcaacatgtgaaatgaaagtgcacatcacaaagaagtttctcagatggtttctttgtagttttaatgtgaagatatttcctttttcaccatacgcctcagtggattcaaaaatatccctttggagatcctacaaaaggcttctttccaaactgttctaacaaaggaaaattttaactctgtgaggtgaaaggacacatcacaaataagtttctcagaaagcttccgtctagtttttatgtgaagatatttcgtatttcaccttaggccataaagggatcacaaatatccctttacagaatatacaaaaagactgtttccaagctgctccatcaaaagaaaatttcaactgtatgagatgaatgaacacatcacaaagatgtttctcagaaagcttctgtctagtttttatgtgaagatatttctttttcaccataggcctcaaacatctaagaagtatccctttgcagattggacaaaaagactgtttcaaaactgctcaatcaaaagaaattttcaactttgtgtgatgaatgtacacatcacaaagaactttctcagaatgcttctatctagtttttatctgaagatatttactttttcaccataggccttaaaccgctcccaaatatccctctgcatatacttcaaaaagactgcttccaaactgctcaatgaaaagaaaggttcaagtctgtgagataaaagcacacatcacaaagaagttcttcagaaagtttctcactagattttatatgaagatatttagtttttcaccacaagccacagagcgctccaaatatccatttgcagatatatcaaaaagactgcttccaaactgctcaatcaaaataaagtttcaactctctgagatgaatgcaaacatcacaaagacgtttctcagaatgcttctgtctagtttttctgtgaagatatttcctatttcaccgtgggcctcaatgggctcacatagatcctttggcagattctacaaaaagactgtttccgaagttctcaatgaaaagaaaggttcaactctgggagatgaatgcacacatgaaaaagaagtttctcagaatgcctctgtctggtttttatgtgaagttatttctttttcaccataggcctgaatcagctaagaaatttccctttgcaccttctacaaaagactgtttccaaactgctcaatcgaaagaaaggttgaattctgtgacatgaattcacacatcacaaagaagtttctcagaaatcttctgtctagtttttatgtgaagatacttcctttttcaccatgggcctcaaataactccaaatatccatttgcagattctacaaaaagactttccaaactgctcaatcaaaagaaacgttcaacactgtgagatgaaagcacacatcacaaagaagtttctcagaaatcttctgtctagtttttatgtgaagatatttcgtatttcaccacaggccataaagggctcacaaatatccctttgcagattctacaaaacgactgtttccaaactgctcaatcaaaagaaaggttcaactctgtgacatgaatggacacatcacaaagaagtttctcatgaatgcttctgtctagtttttatgtgcagatgttttgttttcaccataggcctcaaatggctcagaaatatccctttgcagattgtacaaaaagactgtttctaaactgctcaatcaaggcaaagtttcaactctgtgaaatgaaagcccacatcacaaagaagtttcacaaaatgtttttgtctagtttttatgtgagtatatttcctttttgactgtaggcctcaaagctctccaaatatccatttgtagattcttcaaaaagactgtttccaaagtgatcaatcaaaagaaagtttcaactctgtaggatgaaagcacacatcacaaagtagtttctcagaaagctgctgtctagtatttatatgaagatatttcctatttcaccataggcctcaaagggatcacaaatatccctttgcagattctacaaaaagactgtttccaaactgctaaatgacaaaaaatttcaactctgtgaggtgaatgcacatataaaaaagaagtttctcagaatgcttctgtctagtttttatgtgaggatatttctttttcaccacaggcctgaaactactcagaaatattcctttgcagattgcacaaaaagaatgtttccaaactcctcaatgaacagaaaggttcaactctttgagatgaatgcaaacatcacaaagagttatctcaaaaacttctgcctggtttttatgtgaagatatttagtttttcaccataggcctcaaactgctcaaaaatatacctttgcagattctatacaatgacttgttcccaaactgctcaatggaaagaaaggttcaaatctgtgatatgaaagcacgcatcacaaagaagtttctcagaatgcttctgtccagttattatgtgaagatatttcctattttgctataggactcaaagggctcagaaatatccctttgcagattctacaaaaggactgtctccaaactgctcaatcaaaaaaaaaggttcaactctgtgagatgaaagcacacatcacaaagaagtttctcaaaaacttctgtctagtttttatgtgaagatatttcctatttcaccatagtcctcaaagggctcagaaatgtccctttgcagattctttgaaaagactgtttccaaactactgaatgcaatgaaaggtttaactctgtgggatgaaggcacatatcacagagaagtttcccagaatgcttctgtctaattttatgtgaagatatttctttttcaccataggcctcaaatcactcagaaatatccctttacagattgtgcaaaaagacggttttcaaacagctcaatgaaaaggaagattcaactctgggagatgaatgcaaatatcacaaagaggtttctcaaaaatcttctgtctggtttttacgtgaaggtattgcctttttcaccataggcctcaaaccactcataaatatccctattcagattctacaaaaagactgttttcaaactgctcaatgaaagaaaggttaaactctgagatgaaagcacacgtcacaaagaagtttctcagaatgcttttgtctagttttatgtgaagaagtttccttttttcaccataggcctcaaagagctccaaatatccacctgcagattccatgaaaagactgtttccaaattgctcaatcaaaagaactgttcaactctgtgagatgaatgcacacataacaaagaagtttctcaaaaaacttctgtttactttttatgtgaagatatttcctttttcaccatgggcctcaaagcactccaaatatccacttgcagattctacaaaaagagtgtttccaatctgctcaatcaaaagaaaggttccactctgtgagatgaaagcacacatcacaaagaactttcttagaaaccttctatctagtttttatgtgaagatatttcatatttcaaagtaggcctcaatgggctcagaagtatacccttgcagatactacaaaaaaagtgtttccaaacagctcaatcaaaagaaaggtttaactctgtgagatgaatgcacacatcacaaagaactttctcagaatgcttctgtctagtttttctgagaagccatttcctctttcactataggcctcggtccactcactaatagccctctgcagatactacaaaaagtctctttcccaactgctgaatcaaaataaaggttcaaatctgtgagatgaaagcccacatcacaaaaagtttctcagaaagtttctgtctagtttttatgtgaagatatttcctatttcacctttggcctcaaagggatcacaaatatcccttttcagattctacaaaaaactgtttctgaactacttcataaacagaaaggtacaactctgtgagatgaatgcacacataaaaaattagtttctcagaatgcttctgtccagtttttatgtgaagatattactttttcaccagaggtctcaaaccgcaaacaaatattcatttgcagattgcacaaaaagtatgtttccacactgctcagtaaacagaaaggttcaactcagtgagatgaatgcaaacatcacaatgagttttctcaaaatgcttctgtctaggttttatgtgaagatattactttttcaccataggcctcaagctgctcacaaatatccctttgcagattctacaaaatgacttattgccaaactgctcaatgaaaaggaaggtccaaatatgtgagatgaaagcacacatcacaaagaagtttctcaaaaagtttctgtctagtttttatctgcagatatttcctttttcaccataggcctcaaaacactccaagtatccatttgcaggctctacaaaaagagtgtttccaaagtgctcaatcaaaagagaggttgaactctgtgaggtgaaagcatacagcacaaagaagtttttcagaaagcttctgtcaagtttttatgtgaagatatttcttatttcaccataggcctcaatgggctcacaaatatccctttgcagattctacaaaagactctttccaaactgctcaatcaaaggaaagtttcagctctgtgacatgaatgcacacaccacaaagaagtttctcagaatgcttctgtctagtttttatatgaagatatttcctgttcataataggcctaaaatgctgcaaatatccatttgcagattctactaaaagactgcttctaacctgctcaatcaaaaggaaagttcaactctgtgaggtgaaagcacacatcacaaagaagtttctcagaaagcttctgtctagtttttatgtgaagatatttcctatttcaccacaggcctcaatggactcacaaatatccctttccagatcctacaaaaagactgtttccaaactgctcaatgaaaagaaagtttcaactctgtgaggtgaatgcacacatcataaagaagtttctcagaatttttttgtcttgtttttatctgaagatatttctcttgcactgtaggcctcaaatagctcagaaatatccctttgcagattgtacaaaaagactgtttccaaactgctcaatcaaaagaaagtttcaacactgtgagatgaatgcacacatcacaaagaagtttctcagaaagcttctgtttagctttcatgtgaagatatttctgttttcaccataggcctcaatgggctcagaaatatccctttgcagattctacaaaaggactgtttagaaaactgctcaatccaaagaaagtttcaactctgtgagatgaatgcacacatctcaaagaagttcctcacaatggatctgtcgagcttttatgtgaagatatatcctttttaaccataggccttaaactgctcacaaatatccctctgcagatactacaaaaagactgtttccaaactgctgcatccaaagaaatgttcaactctgtgagatgaatacacacatcacaaagaagtttctcagaatgcttctgtctggtttttatgtgaagatatttcctttttcaccataggcctcaaagtgctccaaatatccatttacagactctacaaaaagagtgtttccaaactgctcattcaaaagaaatgttcaaatctgtgagatgaaagcacacatcgcaaactggtttctcagaaagtttctgtctagtttttatgtgaagatatttcctatttcaccgtaggccataaagggctcacaaatattttttgcagattcttcaaaaagactgtttccaaactgctctatccaaagaaaggtccaactctgtgagatgaatggacacatcacaaaaaaatttctcagaatgcgtctgttcagtttttttgtgaagatatttgtttttcaccctaggcctcaatgggctcagaaatatccctttgcagattctcaaaaaagactgtttccaaacttctcaatctaaagaaaggttcacctgtgtgaattgaatgcatacatcacagagaagtttcccagaatgcttctgtctagtttttatgtgaaggtatttcctttttcaccataggcctcaaaccactcacaaatatccctctgcagatacaacaaaggactgtttccaatctgctaaaacaaaagataggctcaacaacatgagatgaatgcacacatcacaaagaagtttctcagaatgtttctgtctagttttaatgtgaagatatttactttttcaccataggcctcaaagcactccaaacatccatttgcagattccacaaaaagactgtttccaaactgctcaatcaaaagaaaggttcaactctgtgtgatgaaagcacacatcacaaagaagtttctcagaaagcttctgtctagttttgtgtgaggatatttcctatttccccacaggcctcaatgaacccacaaatatccttttgcagattctacaaaacgactgtttccgaactgctcaatgaaaagaaagtttcaactctgtgatgtgaaagcacacataaaacagaagtttctcagattccttctgtatagtttttatgtgaagatattactttttcaccataggccccaaacggctcagaaatatccctttgcagattgtacaaaaagacggtttccaaactgctcaatgaaaaggaagattcatctctgtgagatgaatgcacacatgaaaaagaagtttctcagaatgcttctgtctagtatttatgttaagatatttcctttttcaccataggctttaaactgctcacaaatatccctctgcagataccacaagaagactgtttccaaactgctccatgaaaacaatggctcaactctgtgagattaatgtacacatcacacagaagtttctcagaatgattctttttagtttttatgtgaagatatttcctatttcatcataggctgtaaagggttcaccaatatctgtttgcacattctaaaaaaagactgtttccaaactgctcaaacaaaagaaaggttcaactctgtgagatgaatgcacacatcagaaagaagtttctcagaatgcttctgtctagtttttatgtgaagatatttgtttttcaccataggcctcaaacagctcagaaatatccttttgcagattttacaaaaagactgtttccaaactgctcaatcaaaagaaaggtccaacactctgagatgaatgcacacatcacaaagaagtttctcagagagcttctattttgtttttatttaaagatgtttccttttcaccataggcctcaatgggctaagaaatatccctttgcagatgctacaaaaggactgtttagaaaactgctgaatccaaagaaagattcaactctgtgagatgaatgcacacgtcacaaagaagtttctcagaatgcatctgtccagtattttctatgtgaatatgtttcctttttcaccataggcctcaaagcagtccaaatacccatttgcagattctacaaaaagagtgtttccaaactgctcaatcaaaagaaaggttcaactctgtgacatgaaagcacacatcacaaagaagtttctcagaaagtttctgtctagtttttttgtgaagatatttcctatttcaccacaggccatatagggctcacaaatattttttgcagattctacaaaaagactgtttccaaactgctcaatccaaagaaagtttcaactctgtgagatgaatggacacatcacaaaaaagtttactagaatgcttctgtctagtttttatgtgaagatattactttttcaccctatgcttcaatgggctcagaaatatccctttgcagattctacaaaaggactgtttccaaactgctcagtcaaagaaagattcacctctatgagatgaatgcacacatcacagagatgtttctcagaatgcttctgcctagtttctatgtgaaggtatttcctttttcaccataggcctcaaagcgctccaaacatccatttgcagattccacaaaaagactgtttccaaactgctcaatcaaaagaaaggtacaactctgtgagttgaaagcacacatcacaaagaagtttctcagaaagcttctgtctagtttttctgtgaggataattcctgttaaaccatgggccataaagggctcacaaatattttttgcagattctagaaaaagattgtttccaaactgctcaatacaaagaaaggttcaactctgtgagatgaatggacacaacacaaaaaagtttctcagaatgcttctgtctagtgtttatgtgagatatttcctttttcaccataggcctcaaagcactccaaatatccatttgcagattccacaaaaagactgtttccaaattgctcaatgaaaagaaagtttcaactctgtgaggtgaaagcacacatcacaaagaagtttctcagaatgtatcttcctagttttttttgtgaggatcttttccctttcaccataggcctcaaaccactccaagtatccatttggagattctaccaaaagactgtttacaaactgctaaatcaaaagaaaggttcagctctgtgatatgaatgcacatatcacaaggaagtttctcagaaagtttctgtttagtgtttatctgaagatatttcctttttcaccataggcctcaaagtactctcaatgtgcatttccagattctacaaaaagtctgtttccaaactgctcagtgaaaagaaaggttcaactttgggagatgaaagcacacatcacaaagaagtttctcagaatgtttctttctagttttttttgtgaagatatttcctttttcaccataggcctcaaagcactcctaatatccatttgcagattctacaaaaagactgtttacaaactgctcaatcaaaagaaagtttcaaagctgtgagattaatgcacgcattacaaagcagtttctcagaaatcttttgtttagtttttatgtgaagatatttcctttttcaccataggcctcaaagaactccaattatccatttgcagattctgcaaaaagggtgtttccaaactgctcagtcaaaagaaaccctcaattctttgagatgaaagcactcattaaaagaagtttctcagaaagcttctgtctagcttttatgtgaagatattttctatatcaccaaaggcctcaatgagctcagaaatatccctttggggattctacaaaggactgcttccaaactgctctaggaaaagaaagcttcaactgtgtgagacgaatgcacccatcacaaaaaagtttttcagaatgtttctgtgtaatttttatatgaagatatttcctacttcacaataggcctcaaagggttcacaattatccctttgtagattttacaaaaaaaactgtttccaaatcttcaatcaaagaaatgttcaacagtgtgagatgaatgcaaatgacagaaagaagtttttcagaatgctttcatctaatttttatgtgaagatatttcctttttcaccataggcttcaaagcgatcccaatatccatttgcaggttgtacaaaaagactgtttccaatctgcacaattgaaagacattttcaaatctgtgagatgaaagtacacatcacagagaagtttctcaaaaagctactgtctagtttttatgtgaagatatttcctatttcaccataggccataaagggctcacaaatatacgtttgcatatgctacaaaaatactgttaccaaattgctcagtcaaaagaaagtttcaactctgtgagatgaatggacacatcacaaagtagtttctaagaatgcttctgtctagtttttttggaagatatttctttttcatcataggcctcaaacggctcagaaatatccctttgcagattgtacaaaaagactgtctccaaactgttcaatcaaaagaaaggttcaactctgtgagatgaattcaaacatcacaaagaggtttctcaaaatacttctgtctagtttttatgtgaaggtatttcctttttcaccacatgcctcaaacggctcacaaatatcccttagcagattctacaaaaagactgtttccaaactgctcaatgaaaagaaaggttaaactctgtgaaatgaaatctctcatcacaaagaagtttctcagaatgcttctgtctcgtttttatgtggagaagtttcctttttcaccataggcctcaaaccgctccaaatacccatttgcggattctacaaaaagactgtttccgactgctcaaacaaaagaacggttcaactctgggagatgaatgcacacatcataaaaaagtttctcagaaagcttccatttagtttttatgtgaagatatttccttttttaccatgggcctcaaagtgctccaaatatccatttgcagattctacaaaaagagtgtttccaaactgctcaatcaaaagaaaggttcaactctgtgagatggaagcacacatcacaaagaagtttcttagaaacattctgtctagtttttacgggaagatatttcatatttcaccataggcctcaatgggctcagaaatatacctttgcagattccacaaaaggattgtttccaacctgctcaatccaacaaaaggttcaacactgtgagatgaattcacacatcacaaagaagtttctcagaaagcttctgtctagtttttatgtgaagatatttcctttttcaccataggcctcaaaccacttgcaaacatccctcgggagatactacaaaaagactatttccaaactgttcaaccaaaagaaagcttcaactctgtatgataaatgcacacgtcacaaagaagtttctcagaatgcttctgtctagtttttatgtgagtatatttcctttctcaacaaggcctcaaacgtctccaaatgtccatttgcagattctacaaaaagatggtttccaaactgctcaatgtatagaaaggttcaactctgtgaaatgaaaacacacatcacaaagaagtttcatagaatgttgctttctaggtttttgtgaagatatttcctttttcaccacagtcctcaaagtgctccaaatagcagattctacaaaaaatgtgtttcaaaactgctcaataaaaagaaaggttcaactctgtgagatgaaagcatacatcacaaagaagtttctcagaaatcctctgactagtttttatgtgaagatatttcctattttaccataggcctcaaagggctcacaaatatccctttgcagattctacaaaaggactgttttgaaactgctcaatcagaagaaaggttcaactctgtgagatgaatgcatacatcacaaagaagtttctaagaatgcttctggctagtttttatgtgaagatatttcctttttcaccataggcctcaaagcgctccaaatatccatttgcatattctacaaaaagactgtttccaaactcctcaacgaaaagagagcttcaactctgtgagatgaaagcacacttcacaaaaaagtttctcagaatgcttctgtctagtttttatgtgaagatatttcctatttcaccttaggccataaaggactcataaatatccctctgcatattctagaaaaggactctttccaaagtgctcaatcaaaagaaaggttcaactctgtgagatgaatgtgcacatcacaaagaagtttctcagaaagcttctgtccagtattttatatgaagatatttcccttttcaccatacctatcaaagcgctcaaaatatccctttgcagattctctgaaaagactctttccaaacttctcaatcaaaagaatggttcaactctgtgagataaatgcacatatcacaaagcagtttttctgaaatcttctgtctagtttttatgtgaagatatttcctttttcaccataggcctcaagccgctcacaaatatccctttgcagaatttacaagaacagagtttccagactcattaaggaatagaaacttttatctctgtgagatgaatgcacaccttgcaaaacagcttctcagaaacattctttatagtttttattgaagatatttcctttttcaccataggcctcagagagctgacaaatatacctttgccaattctacaaaaatactgtctccaaactgctcaatcaaaagaatggttcaactctgtgagatgaatgcacacatagccatgaactttctcagaaacttcggtcaagtttttatgcgatgatatttcctttttcaccataggcctcgaactgctcacaaatatccctttgcagattgcacaagaaaagagtttcccatctgctcaatgaaaagaaacgtttacctctgtgagatgaatgcacacattaaaaagcagtttctcagaaaccttctgtctagtttttatgtgaatttatttcgtttttcaccataggcctcaaagcgttcacaaatatccctttgcatattctacaaaaagactgtttccaaattgctcaatcaaaggaatggttcaattctgtgagatgagtgcacacattacacagatgtctctcagaaagcttctgtctagttttcatgtgaagatatttcctttttcaccataagcctgaaagtgttcacaaatatccatttgcagattctacaaaatactggttccaaaatgctcaatcaatagaaaggttcaactctgtgagatgaattcacacatcacaaatcagtttctcagaaaccttctttctagtttttatgtgaagacatttcctttttcaacataagcttcaaagcgctcacaaatatccctttgcagattctacaaaaagactgttaccaaactgctcaatcaaaagaatggttcaactctgggatgaatgtacaaatcacaaaaaaagtttctcagaaagcttctgtctagtttttatgtgaagagatttcctttttcaccattggcctccaagtgatcacaaatatccctttgccaattctacaaaaatactgtttccaaactgctcaatcaaaagaatggttcaaccctgtgatatgaatgcacacataaccaggaagtttctcagaaacttctgtcaagtttttatgcaatgatatttcctttttcgccataggcctcaaactgctcacaaatatccctttgcagatcctacaagaacagagtttccaatctgctcaatgaaaagaatgatttacctctgtgagatgaacacacacatcacaaagcagtttctcataaatcttctttctagtttttatgtaaagatatttcctttttcaccataggcctcaaagtgctcacaaatatccctctgcagattctacaaaacaccatttccaagcttttcaatcaaaagaatggtttaactttgtgagatgaatccacacgtcaaaaagtagtttctcagaaagcgtctgtctagtttttatgtgaagatatttcctttttcaccatagacatcaaagtgctcacaaatatcactttgcagattgcacaagaactgagtttccagactggtcaagggaatgaaacgtttaactctgtgagatgaatgcagacatcacaaagcagtttctcagaaacattctttatagtttttatgtaaaagtatttcctttttcaccatggtctcaaagcactcacagatatccctttgcagattctataacaacaaaatttccaaactgctcataattagtttttaggaccaacatgagcatttagaaacactgcttgtggtgcagcacacatgtgttatccacactgaaattaggaattcaacagaagttcatgtagagccgaaaatgtgaatatttgggggaccttggagatgatctagctcactttattttgtagaaaagaaaacagattcagggaaaggacatgcattgcctaaggtgattccacagctttggtgcagaaacaaaacacagctaaggtgattcatcaggtttggagcagaaacgcaatacaatctctgttcttttgcttctcagatccagaattttttcacaatactgaactgcttatgtttctgattccttattttttctttttaaattttgccagtattgtcttacaaagatcctattctttaccctaaatatttaaattggttaccactattgtctctttataagtaaaattactagttgttattataaatgattattcaatcacttttcatttttgggggtccagtacaaagttagtaacaaataaacactattggccttggcaacccaagaggagctcaagtcctccagggcacatcaggaaaaggctaaatgacagctgtgctgggagtggacagaatacagctctcatacagactattgagtatttgatgtttttcaacaatttcattaatcttcagtttttttcctctttgaagtgaaagtctgctatgactttcaactttcttttgaaataattatagattcacaggaagttgcaaaaggtacagggatgtcttaggtactcttcactaattccagtggtgacatctcacatagccatagagcattatcaaaacctggaaactgacataggtacaattcagaaagcttactcagatcgcaaccgttttgcatgcattcatttttgtacgtgtgtatgtgtgtgcgtgtgttctgttcatttttatgtggtgtagatctctgtaactaccacttccaaagtcaagatgcagaactgtagcctcaccaccaggctccaacttgggatctttgctgacactctgacacgttttctccaccccttccccttggcaaccccatagtctgttctccatctttacaattttatttcaataatttatataaatgtaattgtacaaaatcgtatttttaaagggaaaaaacaagtcacagatagttttgttagcactgtaaaacagtctttaacattcatctgttttatgttctgtctcaaaaaaatgtgctttgttctttcccatactttctgatatcaggataggaaatcaataccaaacaaaacatttccattcattttttcccacagcttgtttttcactgttgttacctaaaatttattgttgcatttactctttctctctgttttccatcacataaaagtaactttgtgttctttatctcttctaagaaaacttggtaatgagcctttaatgtgacgcctggacaacccttgttttgattttgtgttatgggtgttcttttgtgtgatcattctcatggagagtccttgtgaagctgggcttttccagtggtttgtcaaaatggaaatagatatttaacaaaccaaacacaaaatgaccttgttccaggaatgcatcatttctgagaaaacactacctcttccaactagatattgtgaatattactcatattatcctttgctcccttttattaaaactgtatttttttacacatttgtgtaactcgggtaatgaaatgtgaaactaagtgattgcctaccaattacaattaatgttaacgatgctactgggaggacacccttacagtggctgtgccaagtctagggacatgctagctttgctaagttacatgagattgcctacgtactaaatggaggtgggggacgggtccgaggacacggtggcgctgccctgccccgaaaggcccagagctggaggcgggcgcgcgatggtggatgacaccacagcgtccagcggatcaccaccaggggcaagcgaaccatgggaccagacgggccgtgtggcaggcttccggccccggacacaccgtgacgtgccgggcgggtggggggtgggcagggtgtgggtgggcgaggaggacggtgcctcggaggagtgttggggaggaggggcactggagctgtggtcggccagttgctgggccgcctccaggggtggacggtgaaccgcggcgaccgggacgtgctccgccaccctctccccggtggacccttcctatttgcgttcctccccgcccccaacaagcccccaccaccgacgacgtgcgacgatgatggcatgggaccttccaccctgccagggccaatgaaccccacaccatgagctgcatgaggcaagagggagcccccaagggaggaacccagaccgtgatggtggccacgggaactcggccgcagccggctatcttccctctcttttttcactggtggcggtgctgccctctctctcttcctcacagccgggagccccccttccccacgccacccaatgcgtgaccacacagggcctgttgggggagggggaaggggcgggtacagcaggagaggagggcggatgtcgctggtctgcacttgggggaacagagggccccgtgggccatgccatggaacagccgtgcaccccgaggagcctggaggcaaccccgggggattttgatcggcaagcgacgctcagacaggcatagccctaggaggaacccgggccgcaagtgcattcgaagtgtcaatgatcaatgtgtcctgcggttcacattaattctcccagctagctgcattcttcattgacgcagcagccgagtgatccaccactaaaagtcataaaaggttgatttggcgagggcactcccaagaacgggaggccctcctggcacagcacgtcccccagagggattacctcaggccggccagtcagacagcaatgggaccagactccagagaggggttggaaggtttcacaatacagggaggcagtgccaaccatggaggggggggcaaacgctgacaccaccccatgggagcccaggggttcccgcccccacagcgcggggcacaggccacacccgtggcatgtgtgcaacatcacgatggccgctggataaagcccccaccggcatcagcggtgacaccaaagtgtggcgcggccccggctggccggggagacggagtcagcaggggaggcgagggaggggtgggcccctcctgaacggactccaccgtgggcccactgcacctgacccacaggcggaccggcgaccccccaaggggtccttaaacctccacgccagaatgcgctaggtacctggatggcaggggcggatgaggggggtgggaccggcgtccagctccctaccctcgagaccccctagcgggaaggctgggaagagaaagtgggccgggacgggccagtggtgtggtttggcagaggcgatgatggtggcagcggcagtgatgggaacctggccagccctgacgggagcgggcaggatggggccgagacagtgggacacggcaggacgacggccccagtggggagggcaccgagacccccaccccaccatgatgccgagaaatacctccgtgcccaccgatgcacacatgggggccacgtcaggtgaccactccccgctgctcaccaggccggcgagccatccagccagccccatgacacgcacacatggtttcatccccacatgcctgtctctctaccacctctctccctccggagttctccggctctgggggcaggcggggccatgcaacaaacaaagggcaagaccccgcccatgcatgcgccacagggggaacacggtcggccaaggaggaaggacatggcggcgtctctgtggcttcgctcttctctgttaatgatccctccacaggttcacctaccaaaactttgttacgacttttacttcctctagatagtcaagttcgactgtcttctcagtgttccgccagggcagtaggctgacccagcggggctgatccgagggcctcactaaactatccaatcaggagtagtgacctgcagtgtgtacaaagggcagggacttcacgcaagcttatgacccgcatttactgggaattcctcgttcatggggaaaaattgcaatccccgatcaccatcgccaatgaggttcaacaggttacccacatctgccacatagggtaggcacacgctgagccagtcagtgtagcgcacgtgcagccctggacatttaagggcatcacagacctgttattgctcaatctcaggtggctgaacgccacttgtccctctaagaagttgggggatgccgaccacttgggggtcgcataactatttggcatgccagaatctcgttcgttatcggaattaaccagacaaatcactccaccaattaaggccgtgcaccacaactcatggaatcgagaaagagctatcaatctatcaatcctgtccctgtccaggccgggtgagttttcccatgttgagtcaaattaagccacaggctccactcctggtggtgcccttctgtcaattcctttaagtttcagctttgcaaccatactcccctcggaactgaaaaacccaaaggctggtttcttggaagctgcccagcgggtcatgggaataacgccgccacatcgccagtcggcatcgtttatggtcggaactaccacggtatctgattgtcttcgaacctccgactttcattcttgattaatgaaaacattcttggcaaatgcttttgctccagttcaaactgtgccagtccaggcatttcacctctagcggtgcaatatgaatgcccccggccatccctcttaatcatggcctcagttccggaaaccaacaaaatagaaccgcagtcccattccattattccaagctgcagtatccaggtggcttgggcctgctttgaacactctaattttttcaaagtaaacgctttgggccagaggacactcagctaagagcatccagggggcaccgagaggcaagaagcagggatgggccgtggctcaccagcccacctgctcccaagattcaactacaagctttttaattgcaacaactttaatatacgctattggagctggaattaccatggctgctggcaccagacttgccctccaatggatcctcattaaaagatttaaagtggactcattccaattacagggcctcgaaagagtcctgtattgttatttttcgtcactacctccccgtgtcaggagtgggtaatttgcatgtctgctgccttccttgaatgtggtagccgtttctcaggctccctctccagaatcgaaccctgattccctgtcacccgtggtcaccatggtaggcacagtgactaccatagaaagttgatagggcagacgttcgaatgggtcatcgctgccacggggggcgtgcgattggcccgaggttatccagaggcaccaaagctggtggtacccgaccccccggccggggccggagaggggctgactgggttggttttaatctgataaatgcacgcatcttccccgtgaagggggtcagtgcccttcggcatgtaatagctctagaattaccacagttttccaagtaggagaggagccagcaaccaaaagaaccataactgatttaatgagccattcacagtttcactgtactggccctgcgtacttagacatgtatggcttaatctttgagacaagcatatggttctgataggatcaaccaggtaggtagaaagcagcctccgggacttgcgaggatgagccccgcgtcccagttgtgagattgggcgcggcagggcaggcgatggggcgtgggggagggagggagcagctcggggtggtgggaggggggtggtggggcggcgaaccggacatcccatccattcacacgacacaacaccccccgacgggctcaccactcccgacccttcgcgcccatgtgcgagaaggcagaccgcccgacccgtgtgcggcagccgcgagggaccggcggccactcatgcacggagggcacggggcggccccgacgtttgggcagcgaacgagaggcggaccgctgtgcctgggttctcaccgccagcggcctccgagcatgaaggcggccccgcgcggcacctggagcggctgactggccttcggagggcctgcggctcccccaccaccgccactgtcgcggccagcccccggaaccctcttccctgcacgcactgcaggcagaccccaaaccctccgggtgcccaccacgcccactcggggtgccgccgacctggtcccaaaggcgcacgcccggggacacagacaacgggccaaccagtggccggcggcggcgccccacaaggcagagccgggtttggtcccagacggggccaccacagcctaaggcggtgagtcgctcggggagagaggatccgcgggcagggtggggggcacagacgggcaaggccagggaccgcgacggcaagtgcacccgggagcccgcagaggggcggctcggggagaaacctcaggcacggccgggccaccaggaaaacacggccacgggatcccaccgccacagacacgagggaggtcccgcagcgacccgcctaggatgccggacggccctcggcacccaccgagacccgcctcatgagccccgggtcccgccatcaggaccccgaggcgacctcagccacaaacccaacgccagggccacgttgctcgtttctcacccatcctccaacccggtcaagctctgggagaccggcatgccccccacttgggacgcttcccagggccaggcggcccaaaccccgtgccacacaaacgcggtcgtctgcaccggtcgctgctctgcaggggagcgggcagagagccggctcacagcggaacatgtcacaagccggaatgaaagccaggcacagccaccgctcgcgcagcctcccaaccgctaggacgccggcccggcccggcgggatcctcccccgactcggaagggggaggcgtgggccacacagtaggcgacgagctgccctgggtccccaccgcggagactggcggaacccttgctctccccccatcaccccatcaaggggaagcggaggagggtcctctgcaagccagtcgctacgcagcgctaccataacgcagggagaggcggcaggcagggggatccggtaccccaaaggcacacctctcggatcgctagagaaggctttctcaccgagggtgggtcacactccccacccgccagtcgcccctcgtcgggcccgcagaggtgctcagggacgcctagggaagggagagggcctgcggtaccaggaaaaatctgcgtgcggcaaccttgagccttcccggtctgggtggggggcctggccgctgcgcgtgcacgcaatcccccaagggcccccccatccaccagcctcctttctcctaggcaaagcacctccaagtaaacccacacacaacctgtcggaggcagaacggtagcccctcggcgggcggccggccggcgcacgcgtcatctgccccagcccaccgcaatagctcacacggcccgagtgcacccgccagaggggagcacgggaactgcgcttgtcagatcaggcggcacccttccccgcgtgggaggggcccatctcactcaaccgcttcgacccccacaccaacgagctccctcaggacccactcgtggacatcacggcggtgaccggaggagggggcgctgggggtgggaacaacacaccaccactggacctcgggcacctgagggataagctggggggtgaaggggaggagccgggcgtggtaggctcacgcctgtcatccccgcactttgggaggcgagggaaggtggatccctcgatccaagccttggcaacatggtgaaacctcgtctctaaaaaaatacgaaaactaactggtttcataaactggactcaacattaataaatagataagtaggccgggcgcggtggctcacgcctgtaatcccagcactttggaaggccgaggcggatggatcacgatggtcaggagatcgagaccatcctggctaccacagtgaaaccccgtctctactcaaaataccaaaaattagccaggcgccatggcgggtgccagtagtcccagctacttgggaggctgagacaggagaatggcgtgaacctgggaggcagaccttgcagtgagctgatatcatgccactgcactccagtctgggcaacagagtgagactccgtctaaaaaaaaaataataataaatagattaaaattgaaaatttaaaaaaaacgtagctggcgggtctcaaatgctcacgcctgtcatcccagcactttgggaggctgaggtgggagatcacctgagggggccagttcgagacccgcctgatccacatggagaaatgccgtctctactaagaatacaaaatcagctggttgtggtgacacatgcctgtaatcccagctactcaggaggctgaggcaggagaatcgcttgaacacaggaggtggaggttgcggtgagccaagatggtgccattgcactccagtgtgggcaacaacagtgaaactccgtatcaaaaaaaaaaaaaaaattacgcactgtattctgttatttttacttcctaccctgagaagaatataatataactgttgtctgtctgcctgcctgcctgcctgcctgccggtgacagggcctcactctgtctttcacccagactggagtgcagtgacaccattatggctcactcactgcagcctcaacctcccctgggttaggcgattcctcaagggatcctacggcctcaacctcccaaagtgttggtgttacaggcgtgaggcaccggcacccgacttgaattaatacatctggtctcactacgtcttaaccacacacccatgaagaactcaagtcaagaaagagtcggtaagagactctcagcattctctcccgaaaacagtgaggtggatggcggccgtgtgtcttgagctcctgtggttttaggtggccacacatagaggagagatttccaatgtttccagtgatgcgcgagccacagtcattcggggcatctgagcatgagatggggtttctgacagcaacttaagggccaggaagggccagaatctgccaaggcccgtgtcccagggtggggccgatggaacccaaggtagagggagtcagcggtccacacagagagagctccagccttaggccccactgtgcagaccgaatccgaaggaagagagtccttcatcctacatgccacatccctccactgaacttgggagcaaatccattttccaaacatgaggtgactctcactttgcaatggatcacaaggggctgggctttccagagtcagcaggctaaagaagtcatcctggctcagcctcccccaacccctggtaactggtgagtttattttttatttttatttttattattattatactttaagttttagggtacatgtgcacaatgtgcaggttagttacatatgtatacatgtgcaatgctggtgtgctgcacctactaactaactcgtcacctagcattaggtatatctcccaatgctatccctccccccttcccccaccccacaacagtccccagagtgtgatgttccccttcctgtgtccatgtgttctcattgctcaattcacacctatgagtgagaatatgcgatgtttggttttttattcttgcgatagtttactgagaatgatgatttccaatttcatccatgtccctacaaaggacatgaactcatcatttttatagctgcatagtattccatggtgtatatgtgccacagtttcttaatcgagtctataattgttggacatttgggttggttccaagtctttgctattgtgaatagtgctgcaataaacatacgtgtgcataagtctttatagcagcatgatttatagtcctttgggtatatacccagtagtgggatggctgggtcaaatcctatttctagttctagattcctttgccatccccatcaagctaccaatgactttcttcacagaattggaaaaagctactttaaagttcatatggaaccacaaaagagcccgcatcgccaagtcaatcctaagccaaaagaacaaagctggaggcatcacactatctgacttcaaactatactacaaggctacagtaaccaaaacagcatggtactggtaccaaaacagagatgtagatcaacggaacagagcagagccctcagaaataatgccgcatatctacaactatctgatctttgacaaacctgagaaaaacaagcaatagggaaaggattccctatttaataaatgatgctgggaaaactggctagccatatgtagaaagctgaaactggatcccttccttgcaccttatacaaaaatcaattcaagagggattaaagacctaaatgttagacctaaaaccataaaaaccctagaagaaaacctaggcattaccattcaggacataggcatgggcaaggacttcatgtctaaaacaccaaaagcaatggcaacaaaagccaaaattgacaaatgggatctaattaaactaaagagcttctgcacaacaaaagaaactaccatcagagtgaacaggcaacctacaaaactggtgagtttaaatgagctgagactggcaaggccggagacgctatgggggggaggggggtgggcggggtggggggtgcctgaggcactgcagaaagtgggtctgagcctcgaggatgacggtgctgcaggaaactgtccaggctgctatatggcaagcactaaaccactatgcttacagagatggggttttcctcgcagaacacctttatgcagaagtacactcagaagaagccttgtttttactggcgacctgttcttaccgcccaggaaaggcctataaagaatatagactcttgaaaggacacagttgtcctacaccacaatgcaaatacctgcttgcaaaatgttgtgttgatcttagcaagcttgcagaaggggaacaaatcttatctggtggagtgtttaataagcagaaaagccatgatgatattgttactgagtttgatgattcagcttgctttccccttccattgttggaacatgtatattgcaagacagattggcttgccaaaggatcagaatgttaccaaaagagccttagtttaaatcctttcctctggtatcccttcgaatcattatgtgaaataggtgaaaagccagatcctgaccaaacatttaaattcgcatcttcacagaactttagaaactgtctgcccaactcttgcaaagcacaagtacctaatcatagtttatgtcacagacagcctgagaccgttcttacggaaacaccacaggacacaactgaattaaacagattgaatttagaatcttccaattcaaagtactccttgaatacagattccccagtgtcttctattgattcagctgtaatttcacctgatactgtcccactgggaacaggaacttccatattttctaaacaggttcaaaataaaccaaaaactggtcgaagtttattaggaggaccagcagcttttagtccattcaccccaagttttgggattttgccattagaaaccccaagtcctggagatggatcctatttacaaaactacactaatacaccttctgaaattgatgtgccatccaccggagccccttcaaaaaagtctgttgccagaatcagccaaactggagcaaagtctgtcttctcacagggtggagatagccaagaggtaactccaattcttgcacaaacagaaagttctggtccataaataagtacaacacctcaggtattgagccccactatgacatctcccccaaatgcgctgcatcgaagaagttcacgactcttgactagtgacagttccacaaccaagaataggaagaaattaaaaatgaagtttccacctaaaatcccaaacagaaaaacaaaaagtaaaactaataaaggaggaataactcaacctaacataaatgatagcctggaaattacaaaattggactctttcatcatttcagaagggaaaatatccacaatcacacctcagattcaggcttttagtctacaaaaagcagcagcagaaggcttgatgagcctttttcttgaatgggggaaaggttatttagctttgtgttcataccactgcaaagaagctataaatgttttgagccatctaccttctcaccactacaatactggttgggtactgtgccaaattggaagggcctattttgaactttcagagtacatgcaagctgaaagaatattctcagaggttagaaggattgagaattatagagtcgaaggcatagaaatctactctacaacactttggcatcttcaaaaagatgttgctctttcagttctgtcaaaagacttaacagatgtggataaaaatttcccagaggcctggtgtgttgcagggaactgtttcagtctgcaacaggaacacgatattgcaattaaattcttccagagagctatccaagtggatccaaattatgcttatgcctataactctattaaggcgagagtttgtcttaactgaagaattggacaaagcattagctagtttttgaaatgctatcagagtcaatcctagacattataatgcatggtaagtggcaatgaagtgtaaagacaaagtcttgttgatggtgctgatagtcactaatttttcttgttagatagctctttattgtcatgaatttggttactaatacttagggatggtacatactggtcaataacctcaaactaacatgttttcttatgaaatgtgtgtctttaacaaactcttaagttaactaatgatagtagaataccagatccttatactcaacagtttcagtcttctaccaaacttttgcagatactgtagttgtgttttgtttgtttgtttgcttgtttagttttgttacttgatttgttactttttcttgaaacacacaaatggtgattgggacaaaaagtgcttgggaaattggaaaggaatagcataattcatttattggataatagaaaaaaacactgaaaaaattcactagttgctgctttttgacagtgttccagtttattgagttactattaagaatttagtgtacccttttatttagcagtatctctcttttactcttttgtacttgtgtataagtagacacataggaaattactacccaggtcatattgttatcaactgaataacatatgaaaaagtttggttctacttctgcctcaacaccatacttactgttgacatttattgtatttttctgaactgacttaaaagtctaaatatcaagagaaggccaggcacagtggctcacgcctgtcaccccagcactttgggaggccgaggcaggcgggtcacaaggtcaagagattgagaccatcctggccaacatggtgaaacccggtctctattaaaagtataaaaattagctgggcatggtggcgggcgcctgtagtcccagctactcaggaggctgaggcaggagaattgcttgaacctgggaaatggaggtttcagtgagccaagattacgccattgcactccagcctgggtgacagagcgagacgccgtctcaagaaaaaaaataaaataaaataaataaataaataaataaatatcaacagaaagtataattctgaagtcataactctgtggaagcttttttgtcagatatggttatctttggggttaattattatagcagttgagttttaacacttgatttgcttctaaatctgaagcattacattacgaaaacattttttgatttgtgaatatgttgtttaatggattatatctcattttgcagtagtagttgcagtgcctgaaagattgccaaaaaaatagtgctagcttttgctgacacatgtaacaatcaacttaccaatactgccttctcttccgatagctatgttctccgtaatattttaagaactcagttcttcataagacttgtgttgtttttgattttttcccaagtctgattgacccttgtgttgttcttttttaaatgtgtattgtctgttcagctattctgcaggagtcacattcttaaaaaccttaaccatatcaaaaattgtgtttaaaggaggattattcagattggcaagcttttactaggaggagtttaaatgctgatgtatttcagtaactctaaatactgagcaactttattctaactacaaaatagatagcctttctttattttcactttcactattattagcaccgtgtttaacaccttttcttcatctataacacaattataacgatatacaaagccactcaaataaagcagatatattgtgctttaaaaaaagaaaaaaaagaagtcattatgtggcacacagtgaggtgtgatcgaatgtagaatctccagtgaaaaccaatgaaacagggtcaaaccccgtgtctactaaaaataaaaaaatgagccaagcttggtggcgctgaggcaggagaatcgctacaacccaggaggtagaggttgcagtgagctgagatcacgccactgcactccagccggggcgggggacagggcaagactccatctcggaaacaaacaaacacacaaagccaataaaggtgttaaggtgtttaactcaacgtgtcaggctcaggtctcttgacaggatacatccagcacccggggaaacgggaaacgtcgaggggtggggtggaatctattttgtggcctcaaggaagggtttgaaagatagtcccgcaaacgtgacggcctaaggaagcccctccacccaagaagcgatattcatttgtatcctgtagccacccacgagggagaatcgggctctctacagacccccaacccccaccccaccccaccgcaccccccggcctcgtgaaataagctctcgctccgtcaggctgtattcacgccctgtggttttgtaacctccagcgtgtgtgcgtgggttgcggggtggggtgggggcggctgtggacagaggaggggataaagcggcggtgtcctgcggatgcccgggacatgggatgtgagtggggtggccagagcctagggaactcatcgcctgtcaagacgtctcccctcctggtcccctctctgacctacgctccacatcttcacagttcactggggaccttgtgggtggaagtcaccatccctttggactttagccgaggaaggctgggctcccaagagtctccccggagttggggtcttgggcaggctcacaaggatgctgacggtgatggtaacagtgatgtaagttggaggcctctggccaatgcagaggtatccatttgatctcggtgggacaggtcagctttgtggactcacgtgcgtccttccagagactcatccagcgctagcaagcatggtctggaggatcccagctcccagcagaggcactttttttcacacagaatcctgggcaggaaagttctcagcaggtttagacctcctagccaaaaagccaaagccacttctgggattttttttcaaagagccagtggttccacaatgggccatgggtagttgtggaaatggagagaagtgtttgcagatacatatttgagacagaacagacagggctcggtcacaggtcatgaaggacacgagcagatgcacattgagaaaacccagcatcctaggtgaacagaggtatgattttttgagacggtcaagggagatgcaaccccagattttagggttggatctttattaatatgtagtatctatgaggtatccaagtccagaaatcaactcaccagttccgtacagcattcggtagggagatcaaatctgggatgtctaaagttaagaattcaggccatggtaatggattagattagatgtacttgaacttattttgcaaagaaagagagggtgggagatagcgagagccagagagcgagcgagagagagagaaagagagagacagacagagagacagacagagacacaaagatacacaaagagagaaagacagaaagagagacagacagacagataaagacacagagaaagagagagatggacagagacagagagaaacagaaagagagacagagacagaaggagagagagacagacaggcagagagacaggcagagaaagagagtaagacagatggcagacacacagagagagacagagacagatggagagacagaaagaaagagagagacagacagagggaaagagacagagggagagagagaatcagacagagagagagacagacagagacagagagagagagaaacagacaaggagggagagacagacaggcagagaaagaaagagagagacagacatacaggcagacagacaggcagagaaagagagtaagacagatggcagacacacacacagagagagagacagagacagatggagagacagagagaaagaaagagagagacagacagagggaaagagacagagagagaaagagacagacagagggagagagagaaccagacggaaagagagagagaaagacagagacagagagagagagacagacagacaggcagagaaagacggtaagacagaagacagacaaagagagagagagagacaggcagagagagagagacagagagacagagacagagaaacagacaggcaaagagagagaaaaaaacagacagggagagagagacaggcagagaaagagtataagacagaagacagacacagtgagagacacagagagagagagagagagacagcgagacagagaaagaaagagagatacagacagacagacagacaacgagacagacagagaaagacagagacagacagaaacaaagagagacagagagagagaaagggagagagacaggcaggcagagaaagaaagacagaagacagagacaggcagagagagagagacacagagacagagagacatagagaaagaaagagagagaaagacagagatggacagagagaaacagaaagagagagagacagagacagagagaaagagacagacagggagagagagagagagagacagacaggcagagagagagagatataggcagagaaagggagtaagacagaagacacacagagagagagacaagcagagagagagagaaataagacaggcagagagagagagacagagtgagagagaaaacagagaaagagagagacagagacagaaagagagacagagagaggaggaggaagggcatgctcaggaaataattacacatattttataatgcttttgatccggtaaacagtggccggggtgtgctttgaaaacaacaacaacaacagcaacaagagcagcagcagcattcgattacggatttctagaacataagatgttctgaagtctagtaaacatcagccggctctcactacacgttgagagattcacaaaagcactaattaacaggagaaaacagcagctaacatgtcttggggaaaatatacgtcttcctgaaaactggggatttctacttcacctgaaaagaaatacatacgaaaaaggaaaaacatgaacaaaacaaaacaagccaacaaacacgggccaatgcaccgtccctggaaatcttaagtgagcaaagtattagttttcagaaagcgtttctattttgggaaaatgctaagaaggcccagattagagctgtgatgcccttcccattgtgaaactatgttggccggagggcggagaaactaaaacatcatgataaaaggtgattgagacccagccagggtgaagctttcctagggagggaggcctgaggagggaagcgggggaaaaaaaccacaactgcagacccgcccgcttgcccacgcgggtcaagggctatgccatcggcccaagctgcctctggggaagtgggaccgtgccacccccatcttcaaaaacggtggccactgagtgaggcctgaggcccaccgatgcaaatgtcagcctggcaagaatgagatcggcggaagaggtgggggaaggggagagaagacggaggctcacctgggtggctccggaaggtttccaagcagggtgtcgggaggcggggggtggggtttggggggaacccacctaactgactcactaaatgaagctaaagggacgtgggtagtggggggagccgaggggcgacttgaaaattaaactgacccctcctaaatctcaagtagaagagtctatgcgcatgaaagaaaccaacacacaaagaaaactaaagcgctgatcaaagaacaatagggcccccgccagggcagaggttccctaggcaactagggagagagggagggacctccagaagggagagagagaaacccgttgccccaggttcggtgaagtcagggagacctccctccgtgtgacctcaactttcaataacagtggccgctaggtgatgcccgaagacaaccgatgcctgcaaatgtcagtcagcacggaaaagaatgtatttatttatttatttatttagagatagagtctcactcactctacagcctgggctgtagtgcagtggtgcaatctcagctcactgcagcctccgcctcccaggttcaagcgattctccagcctcagcctcccaagtagctggcattacaggcacctgcctcaccgctcctgactcagttttgtatttttagtagagacggggcaaggccggtctcgaactcccaacctcaggtgatccacccgcctcggcgtcccaaagtgctgggatgacagatgtgagccaccgtgcccggccttaaccgtttatttttaagtcgaggaacttatcagggaaatatgagaagtacggacgccacacgtgacagagagaaaagtctgaaaatgccccttgcatccaagtggggacccggactcgacctcccgaaatcatacaccgagtggggaagcccagtagggcccatctgtctagattcttctcggcctctctaagcacctaagcacgcacttctcactttcatggaaggggcagggcctccccgtcacgaggtgcctgacagactgacacagaaagagacagacatagaaagacagagatggacagagagagatagaaagaaacagacagaaagagagagagacggagagtgagtgagagagagagagagacatggagggagagagacagacagacagacaggcagagaaagagagtaagacagaagacacagtgagagagacaggcagagagagagagagagacagagacaaagacaaggaaagagagagaaagacagagacagacagagagagacagaaacagacagaaagagagagagagagaaacagaaagggagggagagagacagacagagacagagagactgacagacagataggcagagaaagagagtaagacagaagacagacacagtgagagagacaggcagagagagacagagagagagacagacagagaaagagacagagagagaaagacggagatggacagagagaaacagacagaaacagtaagagagagagacagagacagagagaagcagacagacagggagggagggagacagacagagagagggagacagacagacaagcagagaaagagagtaaaacagaagataggcacagacagagagacaggcacagagagagagacagacagacagacagagaaaaagaaagagagagacaggccaggcacgatggctcatgcctgtcatcccagcactttgggaggccgaggcaggcgaatcacgaggtcaggagatcaagaccatcctggctaacatggtgaaaccccgtctatactaaaaatacaaaaaaatatagccaggcgtggtggcgggtgccgagtagttccagctactcgggaggctgaggcaggagaatggcgtgaatctgggaggtggaggttgcaatgagccgagatcgtgccacaaaaaaagaaagagacagacagacagagaaagacagagacagacagagagagacagaaagaaacaaacagaaatagagacagagagaaacagacagaaattgagagagacagagagagagagaaacagaaaggcagggagggagagagagagacagatagacagacaggcaaagaaagagagtaagacagaagagagactcagtgagagagacaggcagagagagagagagacagagacagagagaaagacaaagaaagaaagagacagacagagacaaagagaaagagagacagagagagaaacagaaaggcagggggacagacagagagagagagagactgacagataggcagagaaagagagtaagacagaagacagacacagtgacagagacagagagagagagagacagagagaaagaaagggagtgacaggcagagaaagtgacaaagagagaaagacatatatggacagagagagacagaaacagaaagagagagacagagacagagagaaacagacagggagggagggagacagacagagaaacagagacaggcagacaggcagagaaagaaagtaagacagaagacaggcacagacagggagacaggcacagagagagagagacagagagacagagaaaaagaaagagagacagacagacagagacagacacagagagaaagaaacagaaagagagagagagaaacagacaggaagagagagagagagacagacaggcagagaaggagaataagacagaagacagacacagtgagacaggcagagagagagacagagacagagagaaagaaagagacagacagacagagaaagagacaaagacagagacagagagagaaagagagaaacagacagaaacagagagagaaacagaaagggagggagagagagagacaaacagacagaaagggagagagacaggcagagaaggagaataagacagaagacagacacagtgagataggcagagagagagacagagacagacagacagagaaagagacagacaaagacagagacagacagagagagaaagaaacagacagaaagagagagagagagaaacagaaagggagggagagagacagacagacagatggacaagcagagaaggagagtaagacagaagacagacacagtgagagagacaggcagagagagagagagagacagaggcagagagagagagagagacagagacagagagaaagaaagagagagacagacagagaaagacagagatgggcagagagagacagaaacagaaagagagagagacagagagagagagaaacagaaaggcagggagagagagagacagacagacggacaggcagagaaggagagtaagacagaagacagacacagtgagagagacaggcagagagagagacagagagaaagagatggacagagagagacagtgagaaacagacagaaagagagacagaaatagagagagggagtgagagaaagagagacaaacaaagggaggaagagacagagagagagagacagacagacagagagacacagaaaaagaaagaggcagacagacagagaaagacacagacagagaaaaacagagatggacagagagagacagagagaaacagacagagagagacagacagatgggcagagaaagagagtaagtcagaagacagacacagtgagacaggcagagagagagaaagagagagagagaagtcagacacagtgagacaggcagagtgagagagagacagacagagaaagagacagacagagagagacagacagagagagagagaaacaggaaacagaaagagaaacagagagaaacagaaagggagggagagagagaaacagacagacagacggacaggcagagaaggagagtaagacagaagacagacacagtgagagagacaggcagagagacagagagacagaaacagagagaaagagacagacagagaaagacagagatggacagagagagacactgagaaacagagagagagagacagagaaacagacagagagagagtgagagagagagaaacaaagggagggagagacagagagagacagataggcagagaaagacagtaagacagaagataggcagagagagcgagagacagagagagatagagacagacagagagacacagaaaaagaaagagagaggcagacagacagagaaagagatagacagagaaaaacacagacagagagacagagagaaacagacagggagggagagagagagacagacagacgggcagagaaagtaagacagaagacagacacagtgagacaggcagagagagagagagacagagagacagagacagagggaaagaaagagacagagaaagagacagagagagaaagacagagacgaacacagagagacagagagaaacagatagaaagagagaaggtcctagcccagtagcgatacagtgctttttcttttattttctctttcttttcttttctttttttctttctttcatttatttatttatttatttatttggagactgagtctcactctgtcgcccaggctgtagtgcagtggcgcaaccttgggtcactgcaacctccacctgccaggttcaagcgattcttctgccacagcctcccgtgtagctgggattacaggtgcctgccccaccgtgcctgactcagtttcgtattttcagtagagacggggtttcacaatgttggcgaggctggtctccaactcctgacctcgggatgacagacgtgagccactgcgttcagtgtacagtgccatttcttagaaatcactctttggaacacacgtagagattttatttatttatttatttatttatttatttttgtgcgggaaggtggggggacggagtttcgctcttgctgcccaggctagagtgcaatggcataggggactcaaggagtcaacctatggcagggaggacacgtcattctgaacgtaagggccacaacgaaaggtggcagggcccgtgcttttaaaggcacggtggttcaggcctgtcgtcccagcactttgggaggcccaggagggtgggtcacttgaggtcaagggtttgataccagcgtggccaacatggagaaaccccgtctctactaaaaatagaaatattagccggctgtggtggtgcgcgccggtaatcccagctactgaagaagaatcactggaacccaggaagcagtggtttcagtgagccgagagagcgccactgcaccgcagcctgggtgacagagcgagagagactcagtccaaaaaaaagaaaagaataaaaaaaaaaaaaaaaaaaaacagacccaaatactgcattgtcgctgaactttcccccaaaaaggccagaaaccccctgactcaggtcaaggaggtggtgtttcattttacttctctctctctctctcccttcctccccctgctcccccctaacttttatttcttgttcaagcatacatgtgcaagactgttacataagtaaacttctgacaggggggttcagtgtgcagatgatttcatcacccggatactcagcgctgtgtccaacggttttcctgttttgttttttcctgaagctgtctctccttccactcctccctcaagtaggctcccgcgtctcttgtccccctagttctgcccatgcaagaactctcatctataagttcccacttatagatgagaacacacggtatttagctgatcattgctttcatcttcggtggtggcggtgaaagaggcatgacactaaatcggcccttaggactctcccctccgtccccaccccgcacccccttcccacacacaccctcattcctgcaccccctcctcaaacgcaagaaagggagaaagacagaaattaaagtaacaggtgagcctccaaggcggtggaggcgggggatctcaaagggtgagcaagcgatgggggtcggggaatgttttggctgagctatcgaaaataggggacccactttccagccccatcacacccgttaatcctcagctgcagccagcctttgggtggggttgcgcctgtcaaagcttctgaatggagagaagcccaaggctatggaatgcatcagctccaactccaggaagggaatagggctttgtgcatatgaatggggctttacaaggcggtgcctcggcttccaaagcgatgcgcctcgcctcgcctcgcccagagcgagactcggtctgaaaataaataaacaaatataaataagaaaataattcatcaataaataagaaagaaagaatcagtacagcggtcgtggtcatgaatcattctccggagtccaggcgtagtggctcacgcccgtcacgccagcactttgagacgccgggtcaggagggttgcaaaaaatgatgagaccctgtctgtggaaaaacatttaaaaatgaaggccgggcgcggtggctcacgcctgccatcccagcacttcgggaggccggggaaggcgaatcatctgaggtcgggagctagagaccagcctgaccaacatggagaagccccgtctccactaaaaatacaaaatcagccagacgtggtggcgcatgcctgcaatcccagctactcgggaggctgatgcaggagaatcgcttgaaccgggaggctgaggttgcggtgagccaagatcgcgccactgcactgcagtctaggcaacgagagagaaactctgtctcaggaaaaaaaaaaaaattaaaaatggtctgggcacaccggcgcatgcctgttgttccaggtactgtactctggaggctgaggtggaaggatcactggagtccaggagcatccacgctgcagtgaatgagttacgatggcaccactgccagggtgacagagttagatgctgtgtctaaatcagtcaatcagatcactggaaggcactttctgtgtcttactttcaaagggtgtccctttaggccaagcaagcacggtgcctcatgccagtcatcccagcactttggcaggccaaggcaggatgaaagaaggaaaggaggaagggaggaaagaagaaaggcaggatggcagtaaggcaggaaagaagaaagaaggaaagaaagaaagaaagaaagaaagaaagaaagaaagaaagagagaaagaaagaaagaaagaaagagagaaaaaaagaaagaaagaaagaaataaagagagaaaaagaaagaagagagaaagaaagaagaaagaaacaaaaggaaggaagaaagaaagaaagaaagaaagaaagaaagaaagaaagaaagaaaagagaagaaaaaagaagaaaagagaagggaagacaaaaaaagaaaatggggcgagggcatatctccttgactggtgacggcccaggatacagtggatcacagctgactgaagcctcgacctgtggggccacaagtgatcttctccttatctcaacctcccgagtagctgtgactacagatggccatcaccacgcgcaactcatcttataatgatattaagattctgttgggacagggtctcgctctgtcatccaggctggattgccgtggcatgatctcagctcattgcaacctcggcctccctggttggagcaactcacccaccccagtctcctgagcagttgtgattacaagcccatgccaccaggcctggctaattgttctatttttcagagagatggggtttcgccatgttggccagcctggtcttgaactcctggcctcaagtgatccacccgcctcggcctcccaaagcgctggaatgacaggcatgagctacagtgccaggcccagataatctttttaataaattgtagagaaatggtttcatcagccgacgcgtggagggtggggtgggttttactcagcctgcatactgtgaaaagagtgagtgtggtttgtgaactaggtgtggaaattgtgtgtgtgtgtgtgtgtgtgtgtgtgtgtgtaggagagagagagaccaatcccaccatgagaacccagaaattgtgtttgatttgggtccctgtctagtcacctgtctgtctgtagatgactgaggattccacaaatgaaggtcagcagtatctattgagctgtttctccctctcatgcgtctcatgtgtgtggtggagaaagggaagaaaagaggttctgatgggaagttgtcttcacgcctgagtaagctgaaggcagcctgatgggaaggagggcatcctatgtgacatttccatacctgcgcaccctttacaatgctggggctgccagttcaccctgtacgtcaacccacccccaagaacagcacggtctggggtgggccagtctcatcccatccggcccacccggggcatctggtggaagtcttcgccggaggattcgaaagcagcgtcaaagcggttcccctgccgttgcctggcaaaggccagctgtgggagggtagcgggacgtgatgggggcatccgcctcagagctccctggaaggtggcaggtagccggtgggggatgctgaggcagagacgtctggcaggatatagatctggaagccgcgtcagtcctctcccatacctctcctatggaaaatgtcatggccgtggtgggagccttggctgcgggagaagcggggacaagggggagagggaaggaggccctcaggaggatttagcactgaaaacccactcagccaaactccctccgtctttttgggtccaaggtacaccctgggagacggcaagagaaaagttcactccgtgctttttgtctctttagttttttcatcttttccattttacaagagatgctcatttcaacaaccagacagtggatgtgacgggagaagtgtcaaggccaggagtttgagaccagtgtgagcaactgagcaacacaagtaagagagcccagctgaaggaaatgaaaaaggaggaggaggaggacatgggaggctgggggtgggggtaggggggaggagaaggaaagaaagaaaagaaaagaaaagaaaagaaaagaaaagaaaagaaaagaaaagaaaagaaaagaaaaagaaaaacaaccaccaagaaagttaaaattctccaatggtcagaagttcaagaccagcctgaccaagatggagaaaccccatctgtactaaaaatagaaaaattagtcaggcatgatggcacattgctgtcattccagctactcgggaaggctgaggctggagaatcacttgaacctgggagacagaggttgcagtgagctgagatcgcgccattgtactccaccctgggcgtcaagagtgaaactctgtcgaaagaaagaaagaaagagagaaagaaagaaagaaagaaagaaagaaagaaagaaagaaagaaagaaagaaaggaaagaaggaaggaaggaaggaaggaaggaaggaaggaaggaaggaaggaaggaaggaaaggcagattggtgagatgcgtttcaaaattttgtttccagtccccatactaaaaacggaaagaactgacacatgacaaatatgaccagagcgtactgtgcccacaagtgtcatcacagcactctgggaggccgatgtgggatgattactggagccttaaagtttgacatcacctcgacatgtgagatgacacctgcaataataatcatagaagtttaaaaagagattatgtgtgcccagagcatggaaaacaaagcgagagcacatccgtactaaaaacaagatgattgatatacaggcaggcaggcaggcaaatatagaataagccaggtgcagtgtctcacgcctgtaatagcagtagtgtgggcggccgaggcaggcaggtgaattgcttgagaacaagagatcgagaccagcctgggcaacatgatagaaccccgagccccatctcactcacatatatacatacatacatacttacatacctacctacctacggaaaacatgagaaacaacataaaagtcaaccagtgttgtggtgcgtgcctgtagtcccaagtaatggggatgggagagatcagaggcaggacgactgcttggtcggtccaaagcgttgaggctggggtgatcctgggcgacagagacagaggaagaccctgccagtaaggaaggaaagaaggaaggaaggaaggaaggaaggaaggaaggaaggaaggaaggaaataagcaagcaagcaagcaaacaatgaacatgacaatgacatagaataacccatgacaataaacaaggaaataagagggtatcaataaagctgaaaggtaattaagatcacaatcaattgttttctccccatcccaccccaccccatcccacctcaccccacctcacttaagctggagtggaggtgcgcgatcacagcccacgttagcctctgcctcccgggcttaagagatccctgtagtcccagctacttgggaggctgtcaccagagcccagagtgagaagactaggcaggcccaaaaaggaaagaaaataagcaaaaattaaaaataataaatgaaagaaggaaggaaggatatacatacacatgtatatgtaaatgaaatgggttttcatttaatacatattcatacattaaaattaacatttataatataaacatgtatttattatggaaatatccatatagttttatcactacatatttatgtgtttgtatgtatgtatgtgtgtatgtgtgtgtgtgtgtgtgtatatatatatatatatgtatatttatacacagcagtgtgcagaaaataagattgaagaaaaaaaggaattgtccaggctcagtggctcacgcctgtactcccagcactctttgggaggccgaggtgggcggaaggtcaggcgttcgagaccagcctggccaatatggtgaaattccgtctttactcaaaatacaaaaattgctgttcgcttcaaccctggaggcagaggcaacggtggcagtgagccaagaaggcaccattgcactccagctccagctccagcctgggcatcagagcgagactccatctccagaaaaaggaaagaaagaaaggaaaaaaaaaaaaaaaaaaacacaagacaaaaccaaaaaaacaaaaggaggaagtattactgactgatggcaacagtgactccctcttaaaagtaccgcggaagcaaacaaagtggggctgaaaaaaatgtaggagagggagttccacgtggtcccagctccaccaaaggctgaggctggtgagggccacccgcgggtgaacggggataggtgccctcacatgggtgcaccgcaccgtccagtgggaccgccactggtcgcctgctggccaatctgggacacagggagccgccggctaagtccggagctcgcgggcagcagctggttgaccctggaggttccgaccgagatgcggacgctccggatccagctcatcccaacgggcacccctgcacaccgctcggtccagagggcctgctggtcgacctgggacatggcgagccgccagctgtctcacaccctcaggcgtcagctggtcgaccccagaggcctgacccaggagcagccacaagtggaggttggccatgtgtggccaaactccaacccggaagcaggtcgtctaccaatggtttagcaccaggttccccacgaacgtgtgttgcatgacgggcaaggaggccgccttttcagccacacccttcccaggaagaagggcactctgcaccggacccagtcctggcacatggtggggcacaccccacccagggcgaggcagcccaccagcgggggcggggaaccggctagccaaggccaaccaaggctccagggcgctgatgtatccttcctcttgggcgggattctgacttagaggcgttcagtcacaatccaacagactgtagcttcaccccattggctcctcaaccaagcacatgtctgaacctgtgattcctctcatgctgagcaggattaccatggcaacaacacacatcacggagggtaaaactaacctgtctcacgaaggtctaaatccagctcacatgccccattagtgggtgaacaatccaatgcttggtgaattctacttcacaatgataggaagaaccaacattaaaggatcaaaaagcaacatccctatgaacgcttggccgcaacgagccagttatcccttgtggtaacttcctaacagctcctgcttaaaaacgtcagaatgatcgtcaaacccggctttcagtctgtattcgcactgaaaatcacaatcaagcgagcttttctccttctgctccacaagaggtttctgtcctccctgagctcgccttaggacatctgtattactgttcaacaggtgtactgccccaaactccccacctggcactgtcctcagaatgggtcaacacccggccagcatgcagctgggcacttagcgccagaagggagagcccctcggggctcaccccctgcctcaccagatcagtgaaaaaatgatcagagtagtagtattccatgggcagcccacaggaccccaccccaccccctcacggggatagggggcaccggggacctcccacttattctacacctctcatgtctcttcaccatgccagactacagtcaagctcaacaggttcttctttccccaatgattccaccaaccccattcccttggctgtggtttcactggatagtaagtaggtagggacagtgggaatctcattcatccattcatgcacgtcactagttagatgacgaggcatttggctaccttaagagagccatagttacttccgccatttacccatacttcattgaatttcttcattttgacattcagagcactgggtagaaatcactttgcaacaccccccgagggccttcgcgatgctttgtttaaacagtcggattcccctggtgcacaccagttctatacgtcgactgctaagcaccagccgaggcgctgcacggaaccgccgccctggtggcagggaccagcacgtggcccgccacctccacggagtggggaacaggagacagatggggccggggggaggtgggggaatgaaccaccccgcccgccacccaccgacacccaatcactccctgcccgcgctgaaatgcatgacagcgcggagcaagacaggacacgccagcacccaccgggctccccatgggcggccacaactggggcaatccatgggaagagcctggctcgcgtccagagtcaccgccaccaccagctccccctcacgggagatcatgccctgccaccggggccgtatagccaccgccacccctcctcccccacacgccaccaccagagagggggaggacagggagagagggggcgggggagggagcgagcagcacgcgggttggggcagaggagggccacgacaggcgtccctggggcatgggggcgctgcagggcctcttccagcggtggcatgcacccagcccaaccgacccagcccttacagccaatacttatcccgaagttacggatccggcttgctgacttcccttacctacattgttccaacatgccagagtctgctcatcttggagatctgctgcagacatgggtatggccctgcgtaagacttacactgtctcccctggattttcaagggccagccagagctcaccagatgccaccagaaccacgatgctttccaaggtacagtcccctctctcgggtcgaacccattccggggcatcctgcccttcacaaagaaaagagaaccctccccagcgctcccacatgcttctccagggtcagtcacattaccgcactggacgcctcatggtgcccatctccgccactctggattcagggatctgaacccgactccctttcaatcggctgagggcaacggaggacatcacccatcccttcggaacggcactcacctatctctcaggaccaaatgaaccatgttcaactgctgttcacctgagacccatgttcaactgctgttcacatggaacccttctccacttcggccttcaaagctctcgtttgaaaatttgctactaccaccaagatctgcacctgtggcggatccacctggacccacaccctaggcttcaaagcttaccgcagcggccctcctactcctcccggcgtagactctgtggggctgcaggggaggggggaggaggggaggggaggacccccaccacactcacacgggcatactgcccctgccactcctgtccactctcaactgctggcaacagccggatatgggcccgacgctccagctccatccattttcaggagtagttgattcagcagctgagttgttacactccttagcggattccaacttccatggccaccgtccagctgtctatatcaaccaacaccttttctgggatgtgatgagcattggcatcgggcatcttaacatggcattcggttcatcccacagtgccagttctgcttaccaaaagtagcctacgaagcacttgcattccacgcccagctccatgtcagccagccaggcttcttacccatttaaagttacagaatagactgagatcgttttggccccaagacctcttctcgctgaaatgtgggcgtggttggagagtagctgggacagacaggagggtctataagtgctgggggtgaagaggtgagagagactggtgaggatctcactgaggtctgtgagtttctaggtgtttctggggtgtgagagactgactcccgctgaaatctgggcatagttggagagtagctgggacagacaggagagtcattgatggcggggggtgagctgctggatgatggcagtaagaacatatggtatattattaatgaatgaggtgactgtgaagaatctccagaggaggacacgggagagcacaatgacatgagtgattgtcctgcttggctaggaaagggaaatgtaaagttgtgaaattctgttgatgagggatgtgagagtggtgaagtcctgtgggatgatatagagtacttccacatccctggtgaggagctgccccttgggtctgagtttctgggaggggagagggagaagctgggtgagacaggcatgaatcttgaggagtcagggctgggggaccgctcataatctcccgagacctgtgagtctctgggggactcctgggtgcatggggctgactcccgcacaaacctctggatggctggagagtaactgggaggcacaggcgagtccctgaggcctgggggtgaagagatgaaagacataggggaggagcactgtgaggctcgtgagtttgtaggtgattccttggtgtggggggctgactccagatgaaatctggggttgtttggagagtagctgggagacacgggagactccctgagagccaggggtgagctactgggtgatggcaggaagaacatgtggtatgttattgatgaacgtggtgactctaaagaatccccagaggaggacacgggagagcccaatggcttcattgattgcccattatggtgaggaaagggaaatgggagcttgtgggattctgctgatgacagaggtgagtgtggtgaagccctagggaatggtgaatggtagctccggatccctggtgaggagcttcctcttaagtctgagtttctgagaggggagagggaaaagctgggtgaggctagcatggatcttggggagtccgggctgggggaccgttcataagaacagccagacaagatcctacttttcttaggtgcagacatgattaggaaacctgcagctcccagggacccctaccaattttctaacccgcagaatgaaggagtatgtgtgtatgtgtgtgtgtgtgtgtgtgtggtgtgaggtatgtgctccttaagaaaatggaaataaaccaacccatgagacagacagacagacagacagagattcacttagccaagtgttctgtcctgtcctctaaatccacttccaagtcacaagacgctgtaaactccaagtccacgcagagcccgcaaaacgctccggccgctgctacgctcggcgaagatctgagtacaggcccgccaggctgggtttaaatagcctcaggcgcagcctagcagcggaaagggcagagcttcactcttcctttccatcagtcacccccaactttcccaggctacacctcgtaggaaactgttctcctgatttgatttcatgtgccacatttgggacaatctaagaacttacaagttttcttggccaaatatattatgaattaaatgcactgaaacactgaaaaccatctagtggttctgtggttctcatgttgtggttttgacaccagcagcacccttgcaaccctcaaatcccggagatccacaaatttgtgttgtaacaagccctcccactgaccctgatgcatggcagtttaagaattacctgtgtaagcgaaaagactttgaagaaaaagtggagatatgcgttgtataaacattcttttgctctggaaccatgtagagacttgggagccagttgggtggagcattcgttggatgagggtgctcgggttaggaatatcaaggtgtggctccagataattcaatcatctcattaagtttccagttatgctaatctgttttaaaattccgtttgtgtaaattcttttactcagactgagaatggcaaagcctcaaccccaatttccagggagggttgagagcctcaggttgagttgatcaccaatagcctatggtttaacccatcatgcctatagaatgaggtctccataaaaacccaaaaggactgggtttagagagcttctggataacacttcctgaatggtagtgcgcccctccccacatgctgggcccaaaatcttttttctgaattttttgcaatatccgctataataaaatggtaaatggaagtctttccctgagtgctgtgagctcttccagcaaattaatgcaactaaaactgggagtggtggaaacctgatttatagccagttgctaagaagcacaggtaaaataacgtagggcttcccattgttgttagagtgggaggccagtcttgtgggactgagccctttggaatctcatgctatgtcccggtagatagtgtcatcattgaattagaagacacccatacattgagaataatttttctagtcatttgctgtatgtcttatttacaatatgtaatcaaattctttatcctgaccttatggcacctgggttgagaaccatgatttgaaccaaaaattggtctgtcactttctcagtttgaaactttatttggctgcttgggttttgttatagttttttcattttgttttgtttccttttgtttctaagttctggggtatatgtgcaggatgtgcagatttgttacaaaggtaaacgtgtgtcacggtagtttgctgaacctgtcaacccatcacctaggtattaagcccagcatgcattagctgtttttcttaatgctctgcctcccaaaaggccccagtgtgtgttgttccccttgctgtgtccatgtgatctcctttttaagctcccattataagtgagaatgcggtgtttggttttcttttcctggattagtttgctgaggataatgacttcacatcatcagtgttttttcttattttaaagaatagtactttattgaataagatttattcacagaaaaataagctttaatctacaatgaatgccagactctacagcagaaagcaattttctcagttttccacacacaaaggttcctactaagtgaaaaaagccataaaatttcattcacaaatgtactactctgtctcaaaacatttcccataatcattcattgtgctaaaacaattagatcagttattcagtcaggttaatgtatccctctgataactgattttcaaaatgctatcaatatccactccctgtcagtctgccattgttaatggtatacagcattatggaatacaatggaattgatgaagcccatatccacagacaaaccatcacttatgatggtttgatttatgatttttcaactttatgatgggtttattgggatattagatgagtttttgagttacactggatttatgagtatttgaccctatactccagaaatagctgtataaagaaaaacaagtgtacctaattaaattatactgagtgacttgggagaaaccaatagatgtttacaattgatggagaaccaagaaagaaagatagtggtaaataataacaataacacaattttcctgcaactgtcaaggatttcccaaaaattcacagaatgtaggatgcacctaaggcatatgaatgggagagggcagaaggagtaagagagaaataggaggaagcaaggaaggaaggaaagaaggaaggacggaaggaaggaaggaaggagaaaacacccggtgatactaaaaccaaaaaaaaaaaaaaaaatggtttcccactgtgggtaagactacaatgtggatgaatcttgaaaatattgtgctaagtgtaaagtcagtcataaagtctcacatactgtgcaattttgtttataggaaatgtccacaatatgcaaatctatggatatgaggttgatcgctctatgtagttgttacctagggctgagggtcagggagagggtttgagacagaatgaggagtgaataatgtttacagggtttttctctggtcgggggtgataaaatgttctaaaatggattgcgaattaaaattgaatatgcacaaccacaaatatactaaaagccactcaattcatgacttttaatgggggaaacttatgtggcacactctcatcgagaccacggcagatgtagtgaatgagaaaaaggtgagtaaatatctgaaagggaggcagaaacagagagaatgaaaagccctgtgaatggaagagagagagaaaagggaaaatcgtcctatttacaaatgacagatctgaaactggggctcacatcaacagtgtcactgccagggaggagggtcatgctagccatgtcaccggtagtgtcgcccgcagggacgccgacatgctggaggttcatgtcagcatgggctctggcagccacgtgggccagcaggagggtcccgctgcacagctgtccggtgaggatagcctgggtggtgatatcagccattacaggggcctcttctgctggcaagagtgtgacagtagcaagtagatggacaggcctgtgtgtgaggatggaatgcaggagggactcttctgcggctgggtgtggggccctcacgagaaatgtggagaaatggccaggtaactgcgtcatgttggctggtagattggccagggcttcgaagtgaaggacagtaacggggagtagctgtcaggccctgggagtgtctgagtgtaagtggagatgtgtttggggtcactgagggatacgtgggagccatccctgtatagatacaggtcatagggagatagtctcatgaggcctgtgagtgtctatggttctcctgagtgcctggggctgactgcggcagaaatctggggaagtctggagaggagctgggagacacaggagagtccctgaaggctgggggtgaagaggtgaaagaaatgggggagggttgcagtaaggtccgtgagtttgtaggtgattcctgggtgtgggaagctgactccaggtgaaatctggagatggttggagagtagctgagagagacagaagagtccctgagggctgggggtgacaacatgagcgagactggggagtaagtcagtgaaattggtgagtttggtggtgtgtcctgggtgcctggaactgactccagctggaatctagagaaattttgagagtagctgaaagagacacaagagtccatgtgggctgagggcaaagaactgagagagaccagggaggatctcagtgaggtctgtgagtctgtaggtgattccggagtgtaggaggctgactctggctgaaatctgagcgtggcgggagagtagctgggacagacaggagagtcccagggggctgggggtgaagatgtgagagagactggggagtaactcagtgaaactggagagtttgatggtgacttcggggtgcctggaactgactcccgctgaaatctgggcgtggttggagagtagctgggacagacaggagagtccctgagggatggtgaagacatgagagagactggggagtaacacagtgaaattggtgagtttggtggtgatttctgggtgcctgcaactgactcccgctgaaatgcgggtgtggttggagagtagctgggacagacaggagagtccctgagggttggggataaaggcgtgctagagactgaggagtaatttagtgaaagtggtgagcttggtggtgatccctgggttcctggaactgactcccgctgaaatgtgggcatgtttggagtagctgggacagacagaagggtccgtaagggctgggggtgaagacgtgagagagactggcgaggatctcactgaggtctatgagtttgtaggtgtttctggggtgtgggagaccgactcccgctgaaatctgggagtagttggagagtagctgggacagacaggatagtcattgatggctgggggtgagctgctagatgatggcagtaagaacatatgatatattattgatgaatgaggtgactgtgaagaatctccagaggaggacacaggagagcacaatgacatgagtgattgtcctgcttggttaggaaagggaaatgtaaagttgtgaaattctgttgatgagggatgtgagagtggtgaagtcctgcgggatgatatagagtacttccacatccctggtgaggagctgccccttgggtctgaatttctgggaggggagagggagaagctgggtgagacaggcatgaatcttgaggagtcagggctgggggaccgctcataatctcccgagacctgtgagtctctgggggactcctgggtgcatggggctgactcccgcacaaacctctggatggctggagagtaactgggagacacaggcgagtccctgaggcctgggggtgaagagatgaaagacataggggaggagcactgtgaggctcgtgagtttgtaggtgattccttggtgtggggggctgactccagatgaaatctggggttgtttggagagtagctgggagacacgggagactccccgagagccaggggtgagctactgggtgatggcaggaagaacatgtggtatgttattgatgaacgtggtgactctaaagaatccccagaggaggacatgggagagcccaatggcttcattgattgcccattatggtgaggaaagggaaatgggagcttgtgggattctgctgatgacagaggtgagtgtggtgaagccctaggggacggtgaatggtagctccaggtccctggtgaggagcttcctcttaagtctgagtttctgagaggggagaaggagaagctgggtgaggctagcatggattttggggagtccgggctgggggaccgttcattagaagagccagacaagaccccactgttcttagatgcagacatgattaggaaacctgcagctcccagggacccctaccaattttctaacccccagaatgaaggagtttgtgtgtgtgtttatgtgtgtgtgtgtgtgtttgtctgttgtgacatatgtgctccttaagaaaatggaaatgaacaaaccaatgtgacagacagacagagatttacttacccaagtgtactgtcctatcctctgaatctacttccaagtcgtaagacgctgtaagctccaagtccacgctgagcccgcaaaacgctccagccgctgctctgcactgtgaagatctgagctcgggccccccaacagggcgggtttaaatagccttgggcgcagcctggcagcggaaagggcggagcttcactcctcctttccatgagtcacccccaactttcccaggctacacctcgtaggaaactgttctcctgatttgatgtcttatgacacatttgggacaatctgagaacttacaagctttgttgctcaactacattatgaattaaatgcacttaaacactgaaaaccatgtagtggttctgtggttctcacattgtggttttgacaccagcagcatccttgcaacccacaaaccccggagatccacagatctgtgtggtaacaagccctcccactgaccctgatgcatggcagcttaagaattacccatgtaagtgaaaagacttttaagaaaaagtggtgatatacgttgtataaatattcttctgctctggaaccatgtagagactccggggccagttgggtggagcatttattggatgagggtgcttgggttaggaatatcaaggtgtggctccagataattcaatcatctaattaagttttcagttatgctaatctgttttaaaattcagtttgtgtaaattcttttactcagactgagaatgacaatgcctcaaccccaatgtccagggagggttgagagcctcaggttgagttgatcaccaatagcctatggtttaacccatgatgcctatagaatgaggtctccataaaaactgaaaagggctgggtttagagagcttctagataaaccttcctggaaggtagtgcgcccctccccccatgcagggccccatgaatctttttttctgaattttttccaatatccgctataataaaatggtaaatgtgtttccctgcgtgctgtgagctgttcgagcaaattaatgcaactaaatcaggagtggtggaaacctgatttatagccagttggtcagaagcacaggtaaaacaacctcgggcttgccattggtattagagtgggaggccagtcttgtggaactgagccctgtgtaatctaaagctatgtccaggtagatagcctcataattgaattagaagacacccaactgatttccagagcagaatgcattgtgtgcttgactgaccgagagaaatccccagacatgctgtcacagaaatcttctgtgttaattgttgtgatatgagaacggaggaaaaacagtttttgtttttttcactcagcctaaaatgtaaacgggtctattttctcacactattgaggatcacttgatttacaataaaaacgtttagtctttgatatataaaaaggatgttggttttcgttttattgctaacaatcaaggtggtcatagttgatgtctttttgtcatttttcttttcactgccttgtcatgtctttcacccactttttaattattttatttttaactaaaaaaaaattttaggccgggcgcactggctcacacctgcaatctcggcactttgggaggccgagacgggcggatcacgaggtcaagatatcgagatcatcctggccaacatggcgaaaccccgtctctactaaaaatacaaaaattagccgcgtggtggctggcgcctgtagtcccagctactcaagaggctgaggcagaagaatcgcttgaacccgggaggcaggggttggagggagccgagatggcgccattgcactccagcctggcgacagagttagactccgtctcaaaaaaaaaaaaaaaaaaattagatacaaggtcttgctgtgtcacccacgctgaactgtagtggcccaatcacagctcactatagcctccaatccctgggctcaaacaattccgctgcaacagcctcttgagtagctgggaccacaggcacacaccaccaggcctagctgttcacccatttttcaagtgttcattttccccccttcattgttttgtgaccatttcctcttaaggaaattagctactaaccgtcatatgtgttgagaataatttttctagtcatttgctgtatgtcttaattgcaatatgtaatcaaattctttgtctttactttatgacacctgggttgagaaccattatttgaaccaaaaattggtctgtcactttttcagtttgagactttattttgccgctagcattttgtttttgttttgttttgtttttaagttctggggtatatgggcaggaggtgcagatttgttacataggtaaacgtgtgccatggtggtttgctgcacctgtcaactcatcacctaggtattaagcccagcatgcattaactatttttcttaatgctctccctcccctaaccccaccccatgacaggccccaatgtgtgttgttccccttcctgtgtccatgtgttctcatttttcagctcccactgtaagtgagaacgtggtgtttggttttctcttccgggattagtttgctgaggataatgacttcacatcgctagtgttttcttaaatgtcagcatatttctgggacttcatttctctttttgctaatgcaaattacatgcatgtttaagacaatatttgcttatgttttatttttttaagttaaaatgaaagtccccattgctatatcaacctcctctctcttgttacttttatttccctcccaaaattaccgttattaaaaatttcaccttagttgtttcagatcggtttctatatatttacacagatatttgtgtatagttaggaacagagtttggggtttgtgtgtttgtttttgcttaagtggtggacgcctgtcatcccagctactcaggagactgaggcaggagaattgcctcaacctgggaggtggaagttgcagtgaaccgagatcacatgccactgcactccagcctgggtgacagagcaagactccatctcaaaacaaaaacaaacaaacaaaaaaacctggctcttattaatccttttagtctttttccatcaggtgaacaattatggcattacattatgttaatttttccaggtaggagatattggccatcctcttattttttgagacaggaactcaccctgtctcccaggttttactgcaatggtgcaattagagcctcaggcgatcctcagtctcttgagcaactagaactacaggtgtgaaccactgcacctgataattttcttttaagttttttgtagagtcgaggtctcactatgttgcccaggcttgtctcaaactcctgggctcaagctatcctcctgccttggccttccaaagtgctgggattacaggtgtgagccatctctccctgcctcttcatcctcttataagcttattcttttgtattccccttgctatttactccttgtttctttctgtttaggtattcatcttatttatgaactctttgtgtgtatttttttctaggttttgatcttttttcttctgttatatgtattaacaagaaatttactttcaatctgttgattgacatttgttttcatggtgatatgttttagaaagtaatatttcttaataagatgaattatattgctaaatgtagtaatgatgaatttccatgcattactgttgtactgtaataattttaatatgttgatggattttgtttgctgctttccataaaattttgcagttctattcattgagacattttcctttagttttctggcttttttttttgttgctctgttagggtataatttggttatcaagattatactaggatttgtggtagtaatataataagttaagaagctcctaacaggttctgctctctggaaaagtttattctaataatcacctcattgtaggtttgtgttatttctctcttagagcattcagaatagatttcctatttggggatgaaccttaggtttcttctgaggttgttgttttatttagcatttatactgcttgttaaatatatttgcgttctctatatattccctgagaattatattcttcacttcacctctgtttcttctgcattatctgctttccactttctctggttttgttttgctgctgtatatctgagacatagatagttcagtgttaagagcatggggccaggctcagtggctcatgcctctaatcccagcactttgggaggccgaggcgggtggatcacgtcaggtcagtagttcaagaccagcctgacaaccttggtgaaaccccatgtctactaaaaacaaaaaattagcggggcgtggtagctcatgcctagaatcacagctaattgggaggctgaggaaggagaatcacttgaacccaggaggcaaaggttgcagtgagctgagatagtgccattgcactccagcctgggcaacaagatcaaaactctgtccaaaaaaaaaaaaaaagcttgagctctggaaacttcctctcagtttgttgtactagattgtttagtagttggtctgccttttactagacatgttgttctctgtacctcagtgtcctcatccataacatagcaatataatagtgcccattttgtagtgtgacatgagaattaaatgaagtaatacacatgaaagacttagaacacacaaaccctcaatgcatataagctaccactgttattaccactttcttgaaatggaagttaatttattttcactcttgtgtttcataaatttaacgaatgttacaagttttcctctgagtatgattttaagctattttcctctgttttggatatgtacttcttttgcttttatttatttccaaatggtatgtgactattattttgatttcctctttaatccaagcctgcatttaaagagtgtcctcgggttcctttcaatcttgaggtgaataaataacttacagaacactctttatgtccttttgtgaatttaattgcattatgatcaatgaatgtgacctacatggtttctgttctgggacatatgttatctattgcattcaaaaactaccatttgagccaggcgagttggctcaggcctttaatcccagcactttgggaagcttaggcagtgaagttcaagaccagtctgggaaacatggcaaaaccctgtctgtacaaaagataaaaaaattggctgcatatggtggcatgcacctgtaatcccagccacttaggaggctgagacaggagattccttgtctcaaaaacaaacaaacaaacaaaacaaaacaaaacctactatgtgtttaactcatgattctataaatcagtagtttgagtgtgcctcagccaggctcacgcttgcatctgagtcaacttctaagttgacactgcatataatagaactcacacatccttgtcaactgcaccagctgggtcctggggtggggtggggccctcaactgggatctctgccccacttggtcttatacttcagcaggtcacacactcacgaagtcaaagcagtcacagtggcctgagagactgaacagagttgtgcattctgtcagataaaacaattcacaatgccagcattccagggatgggggaatagacttcagctcttgaagaaataaggggctacaatgtcacattgtcaagagtgaaggatttggtcacttctgcaatctcccacagaaaataattcttgagctgtcatatgtagtctatattttgttcttcatcttagtttctcagtgctttttaatgcatgtttgaaaactatattagtttcctcaggctgctgtaacaaagtaccagaaactgggtggcttcaaacaacagagattaattctctcacacttctggagaatagaaatctgaaatcaaggtgtcagcagggccatgctctccctaaaagctctagagaagaattcttccttgtctcttcctagactcggtttccagcaatctttggcatcccctggcttgtatcactccactttttgcctccatcttaacatggcagttttccctctgggtgtgtctgtgtccagagtttcttctgttttttaggacagaaatcattgcattaaggcccaccctaatctaatgtggtctcatcttaacttgattatatctgcaaagattctgttggtcaataaagttatgttcataggtactgggtgttaggacttgaacatatttttgggatggggggggcacacgattcaacccacaacaaaagccatgcatttttttctggtctttgtgatataaaaattatgtatacatgaatatttacagcattttgtacttcaaaacctttgtatcttttcattttatgtcaatgtctctgtcacttttggaaagcaaatgatgttcttcatcctatctcattcatcctcctccacgactattcactagtccttattttaaaaaaaatcaaaacctcagtttccatgatcaatctgcaaccccatccctgaagtttatgcctccttccctctagtatcccaactccagcaataccttgtcctgagggaaacttcaattcataaacccatgaatttctatgactttatcacacacctcatgttcccatttttttctccatacccaatccatagtgcattataaccacaaccttttgtatatcctgagttcccattccattatctctcttgcttttgtggcaaaactcttatccttattaaatgcaaatttttatcacaaacttgttggacatgctggctcatgcctgtaatcccagcacttcgggaggctgaggtgggtggatctcctgagatcaggagttcgagaacagcctggccaacatggtgaaatcccatctctactaaaaatacaaaaattagcggggcatggtggtgggaacctgtaaccccagctcctcaggaggctgagacaggagaatcgcttgaacccaggaggcagaacttgcagtgagccaagatcgcatcattgcactccagcgtgggcaacaagagcaaaactctgtctcaaaaaatcaaaataaacgacaacagcaagaaaatgtatcacaaacttacctgagcagtggctggagaagaaaacacacaattgtgctacctggtcttcctctaaatttcaggccacagacaatgagccagtgctcactgcttccaggcaatcctactctatttctctagactattcagcctcccatttgccggaatgaccatttcccactttttcatctcttcccaaacatctctccctgccctcttcctccctcttcccttctagctcatgaccttgcttctcctttcactgagaaaataaaatcaatcaggaaaaatatgccaccttctactatgaaatctagcaaatttcttgcactgaatccccatatgccttcatgtcaccatggctgggctgtgcctgcttctaactgtaatcccctcagcttgtgcccaagatcccatctcttcttgactagtcaagtactctgtttctgctgctgccccttcaattctccagcgtcaccagcatcactctctttcagtgcatttccatcaacttaggacttggttaacatctccagtcttggtaggcatggaatggtatttgattccattagccttcctagctaccctccctcctttcactgctgttcttgaccacaagttctcaagagacactgcctcagtttctccaattcttttaaaactcactccattcatgcttcccacaacctccacatcatcttgtctggcacacacatttccccatagctgctctagttaagattacatcgccaaatccagcagtcagttttcagcgtctctcatcttacttgacctaccaatagcatatgacaccacttgtatcattagtgtgggtgattgtttccattagtataatgcagcattgtctcaattagtataattatattaatatgcattaatataaattctattaatattattcactataaagccatgtgggaggttatgattctactaccactcatacagtttttgttttcctggtgtttctaagtgcttttttgatacattatatatagttattatttctccaagttttcagtgtctcaaatatgttctataatgtatggagtctactttttccagattccaccttcctggatccccccatctttatccttccttgagggctgattaccatcttggcctgattacagtctggttcagtctcctgggacttcctttcgctgtgatccagcaaaaaatccagggttgaatttcctactccctagatgctaagtcttcctctttcttaaattattacctcatttgctgcagcacgtaatcaagtaacagcatgagggttacttctcctgcacttaagagtacataaagagtacataggaggtacattttctgaatcccagtatttttccatttaggcaatttatagtttgcataactattgctgggtctaagttgacaatcattttatttcagaattttaaacaaaaatatgaattgatgggcagaataatggatgcatattgctgaaggtgcaaattagtgagctggaagattaggcaagggattattccagagagtaatgcaagcagatggcacattaggatatgtgatgggtatatgatggatattaggagacgtgaaagaaggaaccaacatatggataataagagtatcacaaagggagggaatatacaataatggggaggaaaacctcaaaagaaaaaaataaaataaaataccccagagctggaggagagatttgagattctaattgaaaggtcctgctgagtgcttaacaggaagaagcaaaaagctcgtcaaattaaattatggtaaaatttcagctgataaagaaaaaaatcctaaatgcctcaagaaaaaaagtaaaacccaaatattacctattagagattgaagaattaatttggtatcatagtattcatcagtaataaaaactaaaagagagagagataatgtttcaaagttatgaagaactgtaacttgtgtctaagtattacatgcccaggcaagccaacatttgctgtgagggaagaatgaagacataagacaaaaggatacaaggaacttaccaacttcagactgtctgaaaaaaattcttaagaatacagtccagcaaaataaataaattcaagatagaggaagatgtacagtatgtacaacaagcaagaatatacagtaaatcttaaggttaaatctaaataattgtttatatgtgaggaaaaaagaaaatttagtgttcagattctagaagacataaatatgggagatgagaggagaagaaaggaagaaagcttgttaaaaacattcttgtgggccgggcctggtggctcacgcctgtaatcgcaggactttgggaggtcaaggcgggcagatcacgaggtcaggagatcgaaagcatcctggctaacatcgtgaaaccccgtctctactaaaaatacaaaaaaattagccgggcgtggtggcaggcacctgtagtcccagctactcaggaggctgagacaggagaatggcgtgatcctgggagtcagagcttgcagtgagccaagattgtgccattgcactccagcctgggcatggagcaagagactctgtctcaaaaaaaaaaaaggaaagaaaaaaataagaaaaaaacatttctgaccagacttgatggcttgtgcctataatctcaacattttttcagtccaaggtgggaggattgtttgaacacagatgtatcagaccagcctaggcaacacagtgagactctataagaaaatttttaaaaatcaattaggcatagtggtgcacacctgtatttccagttacttgggacactgaggtgggaggattactcatgcccaggaagttgaggctacagtaaacaacagagcaagaccatgcatcaaaacaaacaaacaaaaaccaaaacaactaacagaaaacatttttttaatttggaaagatgatatcaacactgatgaactctaataaacttttaatagaggaattttataacttatatttataaaacatcttattatgttgctataaacatgtgtgtgcaactatctttttcatataatgacttcttttcctctgggtagatacccggtagtgggattgttgaatcaaatggtagttctacttttagttctttaaggaattaccacactgttttccatagtggttgcagtagtttatattcccatcagcagtgtaaaagtgttcccttttcagcccatccccaccaacatctattattttttaaattttttattatggccattcttgcagctgtaaggtggtattgcattgtgtttctgatttgcatttccctgatcattcgtgatgttgagcattttttcatatgtttgttggttatttgtatatcttctttgtagaattgtctattcatgtccttagcccattttttgatgggattcttcgtatttttcttgctaatttgtttgagttccttctagattctggatattcatcctttttcagatgtatggattgtgaagattttctccccctttgtgggttgtctgtttaatctgctcagtgtttcttttgctgtgcagaaactttttacttaaattaagtctcacctatttatcattttttctattgaatttgcttttaggatcttggtcatcaagtctttgcctaagctaatgttttgaagggtttttctgatgttatcttctagaatttttatggtttcaagttttaagtttttgatccatcttgagttgacttttgtataaggtgagagatgaggatccattcacattcttctacatgtggcttgccaattacaccagcaccatttgtttgaatagggtgtctttttttttctttttgagacggagccttgctctgtcaccgaggctggagtgcagtggcagaatctcggctcactgcaggctccacctccttggttcaatccattctcctgcctcagcctcccgagtagctgagactacaggcccccgccaccgcacccgtctaattttttgtatttttagtagagatggggtttcaccgtgttagccaggatggtctccatctcctgaccttgtgatccacctgcctcagcctcccaaggtgctgagattacaggcgtgagctactgtgcccggcctgaatagggggtcttttccttactttatgtttttgtttgttttgtcaaatatcagttggctgtaggtatttggatttatttcttggttctgtattctgttccattggtctttgtgcctatttttataccggtaccatgctgttcaggtgactacagccttatggtatagtttgaagtcaggtaatgtgatgcctccagaattgttctttttgcttagtcttgctttggttctgcgggctcttctttggttccatatgaattttagaattgtcttttctagttctgggaacaatgatggtggtattttgatggaacttgcattgaatttgtaaacaacttttggcagtatggtcatttttacaatattgatttacccattcatgaacatgggttgtgtttccatttgtttgtgtcatctatgatttctttcaacagtgttttatagttttccttgtagaggtctttcacctccttggttagaaatattcctaagtatttttttttttgcagttcttgatttcattcttagcttggttgctgttggtgtacagcagaggtatgatttgtgtacattaattttgtatcctgaaactttgctgaattcatttatgagttctagaagctttttgaaggagtctttagggttttctatgtatatgatcatatcatcagcaaacagcagcagtttcactttctctttactgattcgaacatttctttccctccttttgtttgattgaggttgttgttgttcattttctttcctttagagcagtgattttcaaggggttactgttgggtgttttgaatggatgacttctttgttgagataattaatttacagatgcaatatgtttagcattccttacctctgcatactaaactcataccccagtcactggagcaagcaaagatcacccacacaattcaaaagagtcttagggaggctatttccttcctctttgatggtcactgttctactttttcattttctttttctttttttagacataaaatctcatgctgtcacccaagctggagtacagtggcaccatcattgcccactgcaccctgaaccttccaggctcaagccatcctcccaccacagctgcttgatcaactaggattacaggccagagtcactgttctatagttgggaattaggagcagttcctagatcaattattcaagcactttctcttttgttcctaacatacccatttaagtgtgtattttcagactaaagacaagctcctagattaggtaaaagtaacatttaaaaataactataataataaagagtatataaatagtaaggtaaaaaatgctaattttaagagaaagtgaaaaaataaatactagaggaaatctaatgaaaagaaagcaggtacagtcagcactgaaaagtaaactcaaggtgaaaatacaaagtacttaaaatgttaatgacatttttggtccatcaagaagatatgaccattatgaaacttacacagggtcagcatcactaaattttaaaatccaaaatgttccacaatctgaaacttttggaatgtgaacatgacaccacaagagaaaatttccacacctgaaatatttgctttctttctcttcttttcattaattgatttttctttggtcatctgatgaaggcaatctttgcttctgatggttcaatgcacacaaacattgtatacaaaccttgtgaacaaaattaatcaaataattctataaaattaatttcagggtacgtgtataaggtgtataggaaacacaaatgaattttgcgtttagacttgggtctcatcctcaagatatctcattatgcatatgcaaatattgcaaaatctgaaaaaaataaaaaatctgaaacacttctggtcccaagtgtttcagataaggaacagaccacttccatacctaataacacgacttttaaaatgtaaagccgcttgtatacctaataacacgacttttgaaaaatgaagtaggctgggagcggtggctcatgcctgtaatcccagcactttgggaggccgaggcgggcagatcacaaggtcaggagatggagaccattctgactaacacggtgaaaccctgtctctactaaaaatacaaaaaaatcagccgggcgtggtggcgggcacctgtagtcccagctactcgggaggctgaggaaggagaatggcatgaacctgagagggggagcttgcagtgagttgagatggcgccactgccctccagcctgggcaacagagcgagacttagtctcaaaaaaaaaaaaaaagaaattaaataaataaataaagcaaatgctatagagaggaaaatgacaaatataccattatagacttttttttttaatttttctttctttctttttttttttgagacagagtctcgctctgtcgcccaggctggagtgcagtggcacgatctcggctcactgcaacctccgcctcctgggttcaagcgattctcttgcctcagcctctctgggttcaagcgattctcttgcctcagcctctcaagtagctgggactacatgtgtttgccaccatgcctggctaatttttgtacttttagtagagacggggtttcaccatcctggccaggctagtcttgaactccttaccgcgtgatctgcccacttcggcctcccaaagtactgggattacaggcttgagccaccacgcccagcctgggagcctttttgacatgaacttttcaatcattgacagatgcataatgaaaaaatctaagtaagcataaataagcatgtaggaaatttaaatagcacaattaacaagtctggtgaaaatataaatgtatgcatatccctctgatagagaaaacacattgttttccaatagacacagttgtcacaaaaattaacattgtattaggtcaaaaacaaaaatgttcctgaactcgctttttaaaattcaagtatgtcaaattaaatcaagtaatccttcaacttagagcaatatataagaacatcaaacatgtaaacatcaaaagacagaaataagccaaaagaattgcactgtccctttatgtgccctaagctgcaatgtcaagctatagttggatattattcaaccatttcctgcccattgcctagaggtaggggtcttcacttctctgtctagtctaggactggaactgcctcatgacccctacagcttgagggtgcgtggaaaacggaatgccagccagatattccaaacagagcctctgccagcaggaccaggtgaccattcctaggagagagattgttctcacccattatcagggctttcctccaggctaaaactgtgggtctctaatggaattcttattcaattttctcaccccattagagtacccaaaattttctttaatagaaatcttaattttttttaattttattattattatactttaagttgtagggtacatgtgcacaacgtgcaggttcgttacatatgtatacatgtaccatgttggtgtgctgcacgcatttagcattaggtgtatctcctaatgctatccctcccccttccctccaccctacaacaggccccggtgtgtgatgtttcccctcatgtgtccatgtgttctcattgttcaattcccacctatgagtgagaacatgcggtgtttggttttttgtccttgccatagtttgctgagaatgatggtttccagtttcatctctgtccctacaaaggacatgaactcatcatttttatggctgcatagtattccatggtgtatatgtgccgcattttcttaatccagtctatcgttgttggacatttgggttggttccaagtctttgctattgtgaatagagccgcaataaacatatgtgtgcatgtgtctttatagcagcatgatttaaaatcctttgggtatatacccagtaatgggattgctgggttaaatggtatttctagttctagatccctgaggaattgccacactgacttccacaatggttgaactagtttacagtcccaccaacagtgtaaaagtgttcctatttctccacatcctctccagcacctgttgtttcctgactttttaatgatcttaaatcttaaatgcaataacataaagtaaaataaagcctaagtcccaacaaggggaaattttcaaaaataatctgaaaacttcctgcgttttcttgttatgttgtaatgagtactcctgcaattcccctattaaggattcagacaatggttgttaattcattctgcttcttctgagactaggaaaaaaattactgggctatgttatatcgcaagtgtagattatgcagagtcttcatcaacagaaacaaaacatggtgtggggcggggatggaacaatttaagtgaattttaattgaaaagtttcgtggttttaacattaaaagacatgcctataaaataagaacctgtaaaagtcttcactaaaatggtaaagtgctcatttccaagtagtaaaatattgaaactttttcttttcatcgttgatagtgatttaacatttcattactttatcgttattatgattgtcattattttagacgaatgcatggaagtcaaaggacttccaaatgcactgacgtcaaaggctaccttcacccgggtagccttgcgaatggccacggctgcgcgtggggctttctggggattgtagtccataggcctccttgcgcaagcgctgtggtaccagacgcaagctgcgggcgacattgtttgggatgctggggtgaggcccgcctggaccgcgcccctctcggaagtgtagccaggagtaggggtgtaggatgtgcagctgtgacccgtccctgtggactgaagtaggaggagtggaggaggggactggtgaccaatgataaggcctagtgggtggggtaggctggggaagttcagcggcccctacctacccgggatgggatgggaagcgcttggggtttggggagcgctggatggtttggggagcagccctgggtttgacaaaacgttcatcttcacgtttcgtgacagcgacttgcgctgtgccaccttgggtcgaggcttagggtcagtcttggaatgtgcatctctggatgagggcagaggggagctggctcagggtttgggagtaatggctggggctgtgcctccctgaatgagatgagagatttgcttaagcagcttgtctctggagatagaggatggcttgggctattctcgctcagtttggtcggggcgattctggctcagcacccctaggttcttggatggggagttgtcttgggtctgaactctggattttggcagctctgactccattggggcatttctgacttcagggcagaggttccggcttctggcaataaagaaacaactcagactgtaaaaactctggagtttaatgtcaccgaacacattttgaaaagaactgccccaggcctggcgcagtgtctcactcctgtaatcccagcactttgggtggatcacgaggtcaggagatcgagaccatcctggctaacacggtgaaaccccgtctctactaaaaaaaaaaaaaaaaaaagaaagaaaaaaattagccgggcatggtggcaggcacctgtagtcccagctactcgggaggctgaggcaggagaatggtgtgaacccgggaggcggagcttgcagtgagccgagatcgcgccactgcactccagcctgggcgacagagcgagactccgtttcaaaagaaaaaaaaaaaagaaagaaaataaaagaactgctccaaattattaactccattctcacctcacatgctgtgagccagggagtacggaatttgagtattataaagcacgtgagcaaatgtaagttgttaaattacactcaccaaatttgaagtttgaacgctctctgtatatttgataaagttagagatttagtgttaattattttaggtgtaatagcagcatttattacatttctgatcgtgtttctggacaatttcagttccagattcagctgcacttttcctctaggtcttcattccctgaagaggttgatatgggcatctggtctcattcctgatgtattcctcagatcagagtagttgtcaggttgagggatgagaaaggcatttgtgtgagagagctgtgtggactttggcagatagggaaaaaacaagagtcctgaggtgccacgtgtcccatgcctttggctccccaccttttccaccctgctgtctgccctgaaaggccaccattgccttctggccttgcttgtctttggccagtgggaagtctcaacaggaaagtttggagagagaaagaagtgtgagttggaggatcttgtcccccagttctctctctgcaggattgtcacagattagctgcccttctaaacaacaggtcatggtttgggtggccctggccacacagtcctctcagttccaggctccagggactgctccctccccttacctcttaaggcccaggtattataatggcacctccctgtcacttcccaggatagagccttatccactctgatttccttgcccccagccaacaccatcgtaagctgtctgtttattaaactcccctcaaatttgaatgtgccatctggttcctgccatggcccatagttgatacaggcagggagtgtctgaagccagaaattcaggaaaccaaaccctcaaccatatatgtgtgactgcatgtgtgtagatgtgtgcttgaaaataaatctgtcccattattggctcttaagtgagaacgggtactggaagtagagggtgagtttatgtctttgcacgtgcgtataatgtataatatccaagccaattctgtttgtgcatttgttaatattaagaaacattgattgagtgcttgttaaatgataagatccttagcaagtacagtggataaaagactacagcttgtttttttgtttgtttgtttttgttttgttttgttttgttttttttaggatttgtagttttttgacaggggaaaggaggagtgtttccttggtaggttttaactattgtaaaatgatgtaattcatgctgtattaataagttgaacattccttattttggcctttattggagcccaaaataagaagtgattaatgatgtctcttaaaggtattaaaggagagaaaaagagtccaaggatttaccaaaaagacatttcatattctattaacctgattctataaccctgtgagctgcaattcaaagggtaaccaacagaccagtgccaataaatgatattggtctgtgaccagataatttgagaacttgattgtagatgtttaaaattttgtcttattgattaatataataataacaattgggctttaatttgcataccttcttaatttcctttttccagtaatttctttttactgtatcttaccaaaatatcagtctgtgacagactgaaagtaacggtaataataatataaaaactagtcctttatcacagatagtgtgagaagcactatctgagaaggcagaaacgtggtttttggcttttattttttaatctttggagtttacacagtgcttaaagtggcaattttatacagtaagtttccccacaaaggcgagaggcaattgagcttacagcttttaccagatggaatcccaataaaaaataaacagaacactcaaattgggtaatttgagaagagcttaataaagggacaatctataaagttgtaggcaggctgtggtaatcaacaaagggtattgcaatatttcagagctagtgatagcagggtaacttactgcctttaggactgaagggctaagggaggaggcagtcactaaaatgtgaagaaagatttatgggatgacagctgcctgatggtggccatgacctttggtcaatggatatggagcatagccattccacagcaacctctagggaaaaacctgggggaataaatattctgacttcactcttgtcccttccctggatctcttgctggctttccccattggctgaacccaactggaagctaattggcaagggaatccactgatattagcagaacaggaagggactttagtgtatatgaagtggcaagcttagaaggtctatctatctactttggtctacgtgcagtctgagaacatgtacagttcagtatactgtgagcatttccagagcagaggatgtgtcttatatgtcataagtgtgtcatcaatatttgcaaaagcaagggatagaatgggtgctggagagacagtttaggaagccaagaatcaaggtgtagatgtttaaaaatttgtattattgattaacgtgataataaaaattgggatttaatttgtatatcttggctaatcgcaagttctttagaccacaggcctggccatacaagatcaagtctttcatgtgaaagtggaaatagcagaaggtccctgtcatcctgagattgctctcttttttttttccttttttttttttttttttggagacaaagtctgtctctgttgcccaggctggagtgcagtggtgcaagcacagctcactgcagcctctgcctcccaggttcaagtgattgtcctgcctcagcctcctgagtagctgggattacaggtgcccaccaccaagcccagctaattttgtatttttagtagagacagggtttcaccatgttggccaggctggtctcgaactcctggcctcaagtgatccacccgtctcgggttcccagagtgctggggattacaggcgtgagccactgtgcccagccctgagattgctcccttactcagcaattctggagccttttttccagcgtaattcagatgtagattatgtcagttcattcacaagtctgagaaaaggaaaaaatgtgcaggttttgacccaaaagcttgaggagagagataggagttacacagtggtctgagattgagggactggggacaaatctagggaagtcttgaggaggtgggagttcagtctgttcagaatgagaagagatatctagggagagaagaaattgtgagaaatttgtacagataaggaaggaaccaatgttcatttataacttgttgaatccatgatctcatggattctttcttctttgcagttctgcttttccagaatcctgccctttccaaaaggaagacagtatgattaagttccaggtaagttaagggtttctttctctttaaatatactgttcattctgaggaaccagcacttctgttttctgaaaggtggtcagcattttttgagtgactactatgtattaggtacttcatcttgctcatcatgagtttgtgaggcaggtggtttgactccctttatagaagtgaagaaacaaactcacagatttcaagatgtctactttggtgctactctaagtgtggttcgtgtaccagtaccagtccatgaactgcttatcactgccccatgagggaaaaagaatcaagactaagttcagaagcttttatagcaatttggtgttgccgcagcatctgagtgcatgggcagcatatacatgaccatactctaaatgtcactggtctcgttcgataagtaacaagatttgaatgggtatgtattggtcagaattcaaccagcaaggcagaaccagtaagagatatatattaagagatttatcataaggaattgatttatatgattatgggggctaactaggcaagtccaaaatccacagggcagtcctcaggaagggtgggccagaactcttagacacagactgaagcccctgtctatgggtggaatttctccccctcccagggaagcctcagctctgctcataagacccttcagttttttgagtcagacatactcagattagttagaataatctcccttaaagtcaactgattatggactttaatcacatctacaaattatcttcatagcaatacctagattagtgttttattcaataactgaggaccgtagcttagccaagttgccacattaaaaagaccatcacagtgtggaggaaggattttcttttaatcatgaaaaaaattaattatgaaaatacacaaaaagaacaaatggtattatgaggctccatttgcagtacccatcatgaagtttcaacgattaacttattgccaaagggatttgcttaatctctttttcagttttttctttcccagagtatttgaaagaggcatggtatttacactgtattggtttttctctgagcacatcgcttttgtatagtaccttattatatatgcagctaaaatgaaagagctcacactttatccttctgcctggaaaccatcttgcccaagtccaagattcattaggtacattttctatcttctaaattacagcaacagtttaccaagtgttcaccactacatcacccaggtcaccatttttccagcctcctataacagtgtcctcaatggttatggcctggacctaaagccaatgccatgagtatttggtagcactctgctggttttggttagcttgggtgtgtcctcatagtgaagacagagttacaagagagcaagtgaacgcgtgagatctgtcaaggcccaggttagaaatggcacattctcacttctgcttcattttggtagccagagcaagttacattgccaagtcaaaactaaaggggtaagaaaacacactctggtcctttagtgggattggtgagcatggaagaggatatttctaaacagcaatctaatttaccacattctctatgtatttcagtatatatttccttaaaaactgactaatgagataatcaataattatttggtattatctaatacccagacaataaccaaatttccctgattatctcaaaaaatttttaacagttggtttgttcaaatgggatcttaccaaaagtctatactatcatatagttggctgttgtgtctcataatctcttttaatctagagaaatctgcccctctactttattctctcctgctattgacttgttgtagaaaccaagtttggtatcctgtgttctttcctacatttggaatgcatttgcttgcttccttttggtgtctttcaatgtgttactctatccacagtatttcttgtaagtggaagcaccagatgcttgaatagattcaggttcaaggttttacaagaatacttcatagatggttatacaagaatacttcagaaaggaaaatatttatagatttttgcaagtgtttattcgttgaaaaatttggtttcttaatattttggggctgtccttgtatctgcatcctatgacaatcgctgcctaggattcctacaaggcatccatccagctacaagggtggtggagaaatgagtgttttgttttcccaggctctatagttgaggcagagaagggagaatggggtgtaggctgggtgaacctctattcctaaccccttcttcctacgttggaacaccccaagcagacttcagggtatctgtatttcctgaatgattaactccaattcaattttgttgcctcccacagaagaaggcatacagtagtgttacagagagagtgatgctattaggacaaccgtgctgactcccctagattttgtttttaatcattgtcagattttggtaattggacaattgttaggaacatattctttgtgaagttgtttgtaactgcttacaactttcatttgaaagttctgcattatttagagatgcagagtctattgagagaacatatctgtaaatacttaactctgagcagtgtgatatatgcagcaatagaaatattttacataaaaattgttttcttgattaggagatggttattaatatcagattattccccacatccttttattttgagaaatttcaatttatcaggaaaatgaaagaatagcataatgtgtaatcttcacctagattcaccaattgttaacaatcacccataaacatatgcataatatacatatatacacacacatatctatattttattttgatgacccagttggggataaattgcaggcatgattataattcattcctaaatatttcagcttgtatctcctaagagtaagagcattttcctacatttccacattactgctaacatactcgagaaatttcacattgataccactattttttaatacctagttgatatccaagtgttcttaattatgctaataatctcccttttctctattgtgttttttgaatctaggagccaggcttttagttaccctgtcttcttagttccttttaacatgataaaaatagattaatctgccatgaaaaagtgaaaataccaaatcttggtgtgtgatgagaaatgaactcatggaacagtactagacttgtgtatcagcacaacaccttagtatagatttatctgtgcctatttcctgggccatattttataatttgattcatattgtcctttgggaatccctgatccaataggattaatgtccttatgagacagcctcaacagagcttgctctcattctccctctgccatgtaaggacacagtgagaggacagctgtctgcaagccaagagaagaaacctgaatgaaacctatcttggtggtacttgatcttagactttccaacctccagaacagtaagaagttagtttattttgtttaacctaatcagactgtggtattttattaaggcagcccaaacagactaagaccagtcatttgtgtggatgattgacgtggcatgtggttgatgttttaggaaagggcgacattcaaggacatagctgttatcttcaccaaggaagagctggcagtattggataaatcccagataaacctgtaccaagatgtgatgctggaaaacttcaggaacctcatctcagtgggtgagtaactgagcatcagaccactggacctgtgtcctgaaatcatcatttcaaaccacatagaaaactccagttagatcacaaagagaaactttgaccactggaaagaaaacacctaagagatgcatgtgcaggttagaaccctgcagttaatgagcttttacagatcaatgtgaggatctggccccttgtgatgggtttgtgagggagctctccccaaatctcatacccctggcctgtgggcattcaatgcaggtagtaatccctccctcccctaatcacacatttaggctctcattctttcctcatatttctcagaatgagacataaaattcacacatcaccaagagccttgatctattggatgcttctggagaaaaatcaatgtttatccaatgttttggataaaccagtgttaaaggaacaaagggagaactttgatttggttggcagttacaatagccaacacttactggtatgtagtaagtgtaatctaagtgttggcttatttgattactttttgataaatatctaacctcattttcatttctcagaggttcatatacagttatgtgctacctaagtttagtttatgagatagagatatggtttggctatatccctacccaagtctcatcttgaattgtagctcccataattcccatatgttgtaggtggggcctggtaggaggtaactgaatcatggggcaggggtctttctcatgctgttcttatgagagtgacaagtctcatgagatttgatggttttataaattggtgttctcctgcacaggctttctctttgcctgccaccatgtaggatgtacctttgttcttccttcaccttctgccatgattttgaggcctccacagccatatggaaatatgagtcaattaaacctctttcctttataaattacccagtcttgggtatgtctttattagaaacatgagaatggactaatacagatagttactgttattatcccccttttatggacatattactctgttttcacactgctgataaagacatacctgagactgggcaatttacaaaagatagagatgtattggacttacagttccacattcctggggaggcctcacagtcatggtggaaagtgaaaggcacgtcttacatggtggcagacaagagaagagagcttatgcaggaaaccaccccccctttttttttttaagagtctggctctgtagccaggctaaagtacagtggtgctatcttggctcactgcaacctccaactaccaagttcaggcaattctcctgccttagccaacccagtatctgggactacaggcatgcaccaccatgcccagctaatttttgtattttttagtagagacggggtttcactatgttggccaggattgtctcaatctcttgacctcatgatcaacccactttggcctcccaaagtgctgggattacaggtgtgagccactgcgcccattcaggatctcccttttaaaaaccatcagatctcatgagactcattcactatcatgagaacaacacaggaaagacccgcccccataattcaatcgcctcctaccaggttcctcccatgacacatgggaattgtgggagttacaattcaagatgagatttgggtgggtacacagccaaaccatattatcccaccccggcccctcccaaatcttatgtccttacgtttcaaaaccaatcatgcctcccaacagtcccacaaagtcttaactcatttcagcattaactcaaaagtccacagtccagtgtctcatctgagacaagccaagtctcttccatctatgagcctgtaaaataaaaaaaaacaatttatttacttcctagatacagggcaggtacaggcattgtgtaaatgctgctgttccaaatgggagaaattggccaaaacaaaggggctacaggccccatgcaagtctgaaatccaacgggacagtcaaatcttaaagctcgaaagtgatctcctttgactccatgtcttgcatcctggtcacgctgatgtaagagatgggtttccatggtcttgggcagctccacccctgtggctctgcagagtatagtctcccttctggctgcttttgtgagctggtgtcgagtgtttgtggcttttccaggcacacggtgcaagctgtcggatctagcattctgctgtctgaaggacagtggccctcttctcacagctccactaggtagtgccctgctagggactctgtgtgggggctgtgacatgtgggaattatgggacatgacacttgggaattatgggagttacaattcaagaagagatttgggtgaggacacagccaaaccataccaatggatgaaacaactgagtcacagaattaataacttgcccatgatcacacagcttataagaagaactaggatttgagccctcctaatctggccctaggtcctgtgtttttaataaataacctggtgaaaccaacgtgtaatctgtagacacaggaccttctacataaatctgcatatccctgcagttgtttctcaaactgcaggataaaaccctcttgatgagtcctgaaatcaaattactgtgtcataactagcaatttttaaaaagcaaaatagattaatagagcagaaaacagaagaatttatcaaaatgcattgcacatcatatgtaagtatcagctgataaaacttctgttttagtgagcagtcggtgttgatgtctgtgcctattcctactgagtcacaatgctgattttattgtgggttacaatcaaaacaattgggaaaccactgcttagaacccatttggggcagctcatggtctccctttccctgatactatcttataaactaaagtcactttcaataaaacaacccagaaaggaccttgaaccagaagcggtatccagtgggacttgaccatgatattcatgccattttgaaacccatcttagggtcccaaaaatatgatcatcctcttctgcctcagccccctgtttgttatataccacagtcttgcttccctgggtgccaggccattgacagtgccacagtatctgttccccattctcaaagtcatggctctttgagattctgcaataacttaaaaggtcagaacttaaagaaatggattatagtatctgagtggtctctatcttttcatgaagataaagaacctcggggaaaataaaaaggatgtctcttaaagcttgtctcagaggtttacatatgcatccccgcacaacgccaggaccacatttcacaatgtttatccctatttcaatccccattgccgttttatccccatccccttaaggctcaccatgtacagttgtgcaggttgtacacaaacatacatgatagtcctccatatgacagtgatgtgaaggaagggaagccatcaggagataggacttacttgtttctgaaacctcttgtgaccctttgtgtcccttactctgcccaacatataaaaaacactccatcaatatgtattatttctatacacacatatactacataaaatgggagcctttcccataccttttgtagcaagattattaaagtctttttattgaccactcttatagtggggaggtgaatttcttccttcataaatttttcctaagatttccttttattcttttttgctgtgtgggggtggaaatgtcttgctctgtcacccaggctggaatgcagtggcacaatcttggatcactgcagcctctgcatcccaggattaagcaatcttccaacttcagatttccaagtagctgaaatcataggcaaaacagaaccaattttcaatttttttgtagagatgcgatctcaccatactgcccagcctggtcttgatctcctgagcttgagtgatcctcccacctcagcctctgaaagtgttgctatgacagccataagccactgcacctggccaagatttctcttaatttccctacaatacttgatttctaattggcagctcacaggttagaattactgtggctctgtttcccatgccaatagaagccagggacaacttcccaccccatcatatttcattttctcaaaacctctggacaggtgattcacaaattctctttcttctcatgggagacgggattaaaaacaacattttgaatcttcagggaacggggttaagttacctttctcaagaagtgcttcattgctggcagatttggaaacaaaggatccgggatttaagtgtgagtcaggattatatcatgaaccttcaagaacagtgttccccacatttagaagatgtttccctctgtgaagagtgggcaggcgtgtctcttcagatttctgaaaatgaaaactatgtagtaaatgccattatcaaaaatcaagatatcacagcatggcaaagcctgacacaggttcttactccagaatcttggaggaaagccaacataatgaccgagccccagaaatctcaggaaagatataagggaatttacgtggaagagaaattgtacagacgtgctcggcatgatgagagcctcaattggacctcatgtgatcatcatgagtcccaagaatgtaaaggagaggaccctggtagacaccccaactgtgggaaaaacttgggtatgaaatcaacagttgaacaacatcatgtggtccatgttttaccacagcctttcacatgtaataactgtggggtggcctttgcagatgatacagatcctcgtgcccatcacagcactcacctaggagaaaaatcttataaatgtgaccagtatggaaagaacttaagtcagagccaatatcttatcattcattgtaaaacccactcaagagagactccctatgaattccacgaatggcctacaggctgcaaacagagctcagaccttcccagatgtcagaaagtcccctcaggagacaatcctacaaatgtaaagaatgtggcaagggcttcaggtgcaactcctcccttcacaaccatcatcgagtccacacaggggagatgccctacaaatgccacgtatgtgggaaagcgtttggatttcggtcacttctttctattcatcagggagtacacacagtgaaaaagccctacaaatgtgaagagtgtgggaagcgctttgaacagagctccaaccttcttatccatcagagagtccacactggagggaagccctacaaatccagtgagtgtggcaagtgctttagttcaagctccgttcttcaagtccactggaggtttcacacaggggagaaaccttataggtgtggtgagtgtggaaagggcttcagccaaagtacacaccttcacattcaccagagagtccacacaggggagaaacaatacaaatgcaatgtgtgtggaaaggattttgggtatagttctgttcttcacactcatcagagagttcacactgcagaaaaaccatataaatgcgaagtgtgtggaaagtgctttagttacagttcatatttgcacttccatcaaagcgatcacacaagagagaaaccatataaatgtgatgagtgtggtaaaggcttcagttggaattcagatcttcatgttcatctcagagtccacagaggacagaggccctataagtgtaaggcatgtggtaagggcttcagtcgtaattcgcacctccttgtccaacagagagtgcgtatagatgagacacagtacacacattgtgagcatggcaaagaccttctgactcatcaaagactacatgagcagagagaaacattataaacgtagtaagtcagggttaaattaggaaaacaagccacactgtattccagataacagaggcttactcagcctgtgggagggctgggggagcaaaagacagggacactgccatcaataatgtcagcctgcagcactggagtgtgccaggcaagggttgtggatttcaagaacttctgtgaagctcccatcaactgctgtatgctacaatggcaaagtaggttactcttgacaaatgggtggtttgtggtagtgtttgtagttagaggtcaaatttccattaaagggtgtgtccaggaaggaaattctaattgggatgattatggtaaggtcttcagtttagccaaagtcctgagattttttttagtccccaacagaaaaatactctctgtatgaagaacattcaaaattgtgctcagaaatgaaactgatgctcttaccatgaaagaacattagtactcaggttttccatgagattctctgcacaggcgagaagctctacagaagtggcatttgaagagtgtggtagaggcagtgctgtgtttatcacactggttccatttccttgcaaataggaagactctatttcccagtaacacttgcagttaagagtgtgcccatgtttgagctctagccaatggcgtgtgagcaaaagtgatataagccactttcaggtctagcctttataaacatcttcaggcttctctattcctgccaaggtgacctttgaggctgcttattccagactgcattgatagaaggtcgctatctgatctgttttggatttctttttagagtaagaaataaaaattcactgtgtctcaccactgagatttttggtggtttatttgttactgcagcattgcctaggccatcctgactagcatggagggattttatagcaatatgtttcattgtcagtggagtccacatacagaagaaacattgtaattcagagttcaaagcttttaagtctttaaggctagatgtggcagtgcaaccatctaaaatggtatggatgggacttctccagtgataaccttcattcattggtgtgtacaccaaagagaaatgttcaagatgatatagctgtggtaaaactttactgaaaagtacaacccacagacgtaagaaatctcatacaatagagaaactctgtagtgtgggagctgaataagtttgatagctcacaccttaaatgtgattaaaaattgactagaataggtgttctgtggttagtcttaataaaattaattgaataaaactaacatttactaaagtgagcaacaacatgtaaaaaaccaacagtgttcattgcagactgatgcagtcttcttctcagcagacttgtataataatgggtttttaaagggtgctctttctgtcagcttcctaccaaaattgtcatttaattggggataatagatgaattcgagaggagatctcattgcttttttttttttttttttttttttggaaacagggtcttgctctgtcatccaggtggctggagtgcagtggcctgatcatggcttgctgctgaagccttgaactgctgggctcaagtgatcctcctgcctcagcctcctgagtagctgggactacaggcatataccaccatgttcagctaatgttttcttttaaaaatttacttgtagagatggggtcttgctttgttgcccaggttagtctcattctggtttcaagcgatcctcctacctcagcttcccaaagtgcagggattacaagtgtgggccactgcactcagcccacaatgtcttttattttttcttcaaaaacaatgtccttttctgttttaattgacttataagtttcttcatttggatcatggtttattcctagtttttcttgcattatattttcctgccagttatagtttgtaaacagaacagccattcaagtgcaaataaaaccatccctgaagtgtcattttcttactgagcaggtggataagagtgaaatattttaaaaattctgtgtcagtagaaatgaggaaatgagtgttcttacataagttggtgggggaaaaaaacaggtaccaagttgctggagaggatcttgtctatatgtatcagatgtacaatgtgcattgtctttgagccaatgatcctgcttctcagaatgtatttttaggatgtaattacatgagtggaaaaagatggtttcagaaagaaatatgttctaagaattttgcaataagaagaccataaatgacctgaagcttcatgtataagagattaagtaaattagggcatcccatataatggaataacatggctccatcaacaatgatctagacctataaaaatgtccacatattattgtccatgtccaccacatactccagtcctcctacttgcaaacagtaggttagagaaaagatctgggatacacattatcccaggaagcttttggggtttagaatgggtgcaacattccctcatgacagaattggccctcagccttggtcgaggtgtcccaggcaatcctccagtttggccaggagcagcacttgcatatcacattaagctttttaaatatatgatgctaacaggattgtctccctacttcataaaattgtttgcttttcctcttgtaacaaagtagcatggaaaaagcagaaattagtctagctcccaatcagtgggagccaactcatttacaaatatagatgcagagatcctaaataaatatgagcatgtcaaatccaatgatttgataaaagcataacagactctgctcatgtataatttatcctaaatatgcttatcagcttctgcctcataacacacacaagaactgagtagctctacatacaaatttatttagctcatgatgtgtgagctggcaagttcagttcggcttagctgggcagttctggtgtgggacatgctagattatcttaactgggctttgtacatgcatctgcattcagctgatggctcatctgggcctggctattttatgatggtcatagatgagacaacgaagttctctctgtcatcatggtctctcatcatccagaagaccaatctagggttggtcccatagtgccagggtttcaagagcaaaagctgtgatctcttaaggcctcatcagagaacaggctcaatgatacttccaccacattctaatgattaaagcaagtcacaacactggcccagattcttgcggtgggattaagacaagataaaaaatgttgagacgtaatcattggaaggaaaaagaaggtactatttttatgttagagaataatgttatttacttataaaattcaaatctgcctgtaaaatttgaccaattgaagtatgttttaaaattatcagttcaaaaaattggtttcatacaaaattggcacatgaaaattcatagcattactatttaagagtcttttataaaatgtagccaaaatgtttcattcacaataacaattgtgtgcaaagaccagaattctccaaaggtaattctgggagttccctttgggatgcctaggtgagtagctatctggagcctcagactcccacattcttcagtgggaaaagctttacatgagctcaacttcctagcggctttctctttctgatgggaggtgttagaacctggctttctcatgcaacttctgtgaagctctgacaactaaagccagattgtctgctttagtcaatctgttagatcaattagtcatttgatctgacaactaaagccagattgtctgctttagttaagtagtccagattacctgcatagtcaatttgttccctcaccaacatggatgccttcacaattgctctttaagaaggataaaaagataggggtgaggtgtggtctatctcctgcttcactcaggccctggtgcttcctcaagtggtgtgagaaactgtggtcctgtgcgttctcttccagacccttagcttatatattttccctataaaacttagtcctaatcccagcattttgggaggccgaggagggtaaatcatgagatcaggagtttgagaccagcctggccaacatagtgaaactccgtctctaaaaaattagctgggcatagtggcaggcacctgtaatcccagctactcaggaggctgaggcttgagcccaggaggtggaggttgcaatgagccgagatcacaccacagcactccagcccaggcggcagtgagagactgtctcaaaaaaaaaaaaaaaaaaaaaaaaaaaagaagtcccttatgtgtgatgataaaatttgatgaagagcaacattggtggacttacactaccagagatcaacatttattataaatgttctataattaatacagtgtagtattagctcaggagagaaaaaatagatcaatggaaaagaatagggagtctaaaaacagatccacatgtatacagtgagtcagtttatcagccttgaaatacgttggagaaataatagtcatttaataactgatgctgggttcactggctacttaacactagttcttcatacaattgcaggcaataaatacaaatagcatgcagctggcagactgggatcagtggctatgcctccactagactgcccatagaagcacatagtaacagctaccaaaggtgtctgatctgtcttgtctttttttaaactcattttgttcaggtataatttacataaaatgcagactttaactacatttgttttaacaaatgtacatatccttgtaaataatgcccattcaacatgttaaacattttatttaccccaaaaatttcccttgtgcccctttcccttcatttctttccaaaaaaggatataatcactgttttgtttctatcaccatatgttggtttgcctattcttgaactttatataaatgaaatcatactgtaagatactcttgtatttggctttttttcattcaacatggttttctaaattagtaatttataataaagagtactgcatattttattattgtttataaattgtgttctaaaaacattctatgttagtaaaatttatagtaaacttctataatgtacatacttttctttctggagagccatttattaaacatttattagcataccactcacagaggagatgtaagcccagaattggcctttttcttctgaagtcaactagctttgaattagaatgtaacattagttattattcctcattccccactcattctctgtatctacttcccttatttttttcttttatttttctgcagacactatggttacttaagtgtctacttctctttttctgcatgtctttgagtggagacactggtcacctttgtttcccactgtcttttcaaaggtgtatgttagggaacaaaaatatagtgtctccctctggagcagtagatttgtttatggcccactctagtgaagacagtgtctccctctagggtgaagggcagtggttttattcccacaggctatcataaaagattcaggtttcctaagcttagggttctatccctacaacacagcccgctaggcctgtggcacctggccttccatgtcactctgtgggattagaatgccaaaaaccattgcaaagaatgacactctggctactgctgtggttgtggctaataaagtcctttgtctcagagccaggagtcttttgtcttgtgccagcatctgtgagactgtcaggctaacttgtgagctcataaattggttactttcagatccttggtttttgatggaaataaatgtctcttaatcttagaggcaaactagagctacctggaatgctttcagctttttacaattttttactggtgaaatatacataacatgaaatttaccatctcaaccatttttaagtgtatagcttagtagtgttaagtacatttacattgttgtaaaaccagtctccaaaactcattttatcttgcaaaactaaaactctatcccattcaacagcaaccctcaattttcccctgctcccagccactggcaaccactatactttgtgtctctatgcatttgacttccctgggtcacataaatggaatcatacagtatttgacttttttttttttttttttttttgagacggagtctccctctgttgcccaggctggagtgcagtggttccattttggctcactgcaagttccgcctccagggttcacgcacgccatcttcctgcctcagcctcctgagtatctgggactacaggcacattccgccatgcccggctaattttttccatttttcgtagagacggggtttccccatgttagccaggatggtctcgatctcctgaccttgtgatccgcccacctcggccccctaaagtgctgggattacaggcatgagccaccatgcccggtccagtatttgcctttttgtgactggcttatttaacttaacataatgtccttaaagcttatttgtgttgtagaatgtgtcagaattttcttcctttgtacacttgggtttcttccacttttcggctactgtgaataatgctgttatgaacataggagtacaaatatctcttcaagaccttgctttcaattcttttggacacatacccagaagtggaattgctggatcatatgataattgtattttcaattttttcaggatctgccattctgttttctatagaagctgccaccatttaacataatgtttttaagttcatttatattattatgcttgtcagtcttctttttgtgttcagagtaatcaggaaattaccatagtttgcccattctcacgttggtgaacatttgtttccaggttttggaaattttgaataaagctactaagaatattcttgtattagcgtttttgcagacatatgctttgatttctcttgggtaaatacgtaggagttgaattgctgtcataagctaagtgtatgttatctttatgaagaattggctgtccttgtctattaacataaagaatgaggtactttattgttcacttaaaatctttatgtggttgggctgtgtggggtggcacataccagtaacatacctgtagtctctgctactggggaggcagaaggatcacttgagggcaggagtttgaggctattgggtgctacaatcgtgcctgtgaatagccactgcactctagcctgggcaacttagctaaaaaaatttatgtggttaaaatttcaatgtgtttatgaaatttttgtataatgattttttaaaagaaaactttcccatactcccaggcactaattattttcaaaacatgaagaatatgttttaagtggtgtcaggcacaaatctaattttaattttttctaattggatagtcaaggctttcaacatttattgatgagtcccttttttatttactgatcttaaaggtcacatttatactacactaggtatatccattcctggagtctcctatcttttatgtttatcactgaaatctctgaccttttttttttttttgagatagagtcttgctctgtcaccaggctggaatgcagtggcacgatcttggttcattgcaacttctgcttcctgggttcaagtgattctcctgcctcagcctcctgagtagctggcattacaggagcccgccaccatgcccagctaatttttgtatttttagtagagaggaggtttcagcatgttggtcaagatggtctcctgatctcatgatccacccacctcagcctcccaaagtgttgggattacaggtatgagccaccatacccagcccatttttgtttattctcaaaccactatctcacatctttaagaatgatacttttggtagaaggcaagtaacagtgaatatgctaagtgtatgtttaactttaccatttctaaaaatgactataccactttatacttccattagcagtcaatgcaagatcacttgttctacatgctaaccaacacttgggatttttagtcattgggattatttgtagtgttatctcactgtggtttaattagcatttccctgataagtaatgatgtggttatcagtcattttatcatgtgctgattggtcattttatatcttctttggaaaagaacttttgaaagttttgcttgttttttgttggtttgtttccttactgttgagttgtaagatttcttaatatagcctagatacgaatcctttctcagataaatacattatgaatattttttcctagtcttggcttgcctcttcattttgttaatgtttttaagagagtaagttaatttgatgaagttctggtttatctttttaaattagattttgtgctcttttttgcctacctatgaaatctttttttgcctatcccaaggttttgaaaatgttctcctatattttcttgtataacatttgtagttttagcttttcatttaggtctgttacctattttgagttctttttgtgtatgatgtgaggtaagtgttgaggttcataattttcgaataggtgtccagttgttctagtgctattttttgaaacaactttcccccattgaattacctttgtggctgcactgaaaataaactgatcatatatacttggctgtattttctggaatcacttctgttccactgatttatatagatattgttaagcttttgctatgtcttgactacaggagctttagaacaagttttgaaatctgatactgttattcctctaatgatgttcttccttttcaaaacaatcttgactattctagtttttttagttggctgttttttgcatttcaatgtaaatctaaatattagtttctgcaaaaagcctgctctaaatttgattgatactgtgttgactttatagatcaatttggaattctggttctgggtaagatggagtaagccagtggctgggaaattctggcctaatggttaaatatggtgtattgactgtttttgtatgcccccatgaagtaataatggcttttacattttttattgagacagggtctcactccatcacccaggctggctcactgaagcatcaacctcctgggatcaaaaaatcctcttaccttaacttcctgagtagttgggactataagcatgcaccgccatgtccagctaattttttgcatttttgtagagatggggttttaccatgttgctcaggctggtctcaaactcctgagctcaagcattctgccctcggcctgccaaagtgctgggattacaggtgtgagctaccatacccagcctacatttttaaatagtcaaaaaaatcaaaagaagaatattttatgacatatgataagtatgtaaaattcaaatttcagcattcataaattttggttgaaacacagtcatgcttatttgtttacatattgtctatggctgttttcctgttatattggtacagttgtgtacttatgatagagaccatatacaatgctctcatcacttcatactgctactcagtgtatcataaatcacagtaacacagttattacaagttaacagatttttgagtgccatatgtatcactctctatgatattttatttattttgcatattcgtcatgtcaaaacaagaagagaaaatcaaattttgaatgtcgtgcttttaaggtatagtaaagtgtggattattttgttagagaatctgacggctgactattgtgtttgttatgcagtgacagctgtacaagaagaaaaattataacattaatactgccagattaaaaacttatcccaatatttccaaatcacagataattattgccaaaaataaaaaaattaaaatggaatattttatcaaagcagaattacttttatgaaataacaaatgaaaatgaggctataaccaaagtaagttttagagtggctaatctgttagtcaagcaagaaaagttatttactgatgatgagttggtcgaatcgtattttgcagcagctgaagaaatgtatcatataaatttgtctaagactataagccttttgacaaggacagtttcttaaaaagttgagaacattgggagcagcactgatagtcactttaaaaacaagatcataaaaaattcccaattattgttgccagtgatagtgaaaatttatcagccataagtgaacacaaaacaaaacaaaactgaaagacaaaattataagaaaactaaaatgagaaaaacagaggatcaacaaatttctattgctactttgtatttacctctgggagccaagaaacaatgcaactgggcttaagaccatcactgaggtgtacttttctggtgacagatattacctggatttgttacatgaatctatttggcatctctgtgggacccccaaaactgttaaaaaagtaattttcaaaaaataaaatcataactcttacacaggtatgaaaagaccagctagggaatgataaactatttgcaaatcatgtatgtgtaaaagtcttgtatagagaacatataaaaactctcaaaactcaataggaaaacaatccaattttttaagctaaaagatttaaacaagcacttcactgaaaaagatatacgtatgacaaaggggcacatgcaaagataatcaacatcattagtcattagggaaatataaatcaagaccacaatgaaatatcactacacatctattagaacagctaaaaaaaaaaaaatagcaacaatgtcaaactctgacaaggatgtaaagagactggaagtctcacaaatttctgttgggaatgtaaagtagtagagccactccagaaaacagtttgacagttccttaaaaaattaaacacatccttaccatacaaccccataacttcaatcctggacatgtactccagagaaatgaaaacttacatacacaaacaaatgcacacaaacctgtacatgaatgttcatagtagctttattcataatggcaaaaaactggaaacaaccaaaatgttccctaataggtaaatgttaaacaaatcgtggtacatccataccgtggaatactactcagcaataaaaaggaatggactattgatacacacacaacttagagggatcttaagataattaaactaagtgaaaaatgtgaatctattttatggttctagttgtataacattcttgaaatgaccaaattatagagatggaaagcagattagttgtttctagatatcaggaatggtggaagggaggggactgggtgtgactatcaagatgtagcaagaaggagggctttgcagtgatggaatagttatttatcttgatacaagtgataaaatacaactacacatattcatggtatcaatataattccctggttttgatgttgtattttaattaaggacagtataatcattgggtgaaactgggtgaagggtacgtgggacctctttctactatcttttcaatttcatatgaatctgtgattattttaaaataaaatgtttaaaaaataattggatgcttaggacctctatagaggattttatttatttctgccagatttagaagcaatacagggtcagggatttagttgacttggatttgggtttgaatgcctgccaagttgggcctactttccattcaactttacacctaggatgcagtcctttggtgttccatacacaaaacccaagtgattttttttttttttttttttgagacggagtctccctctgtagcccagtctggagtgcagtagtatgatctcggctcactgcaagctctgcttcccgggttcaagtgattctcctgcctcagcctcctgagtagctgggactacaggtttgcgccaacacaaccagctaatttttgtatttttagtagagacagggtttcaccatgtttgccagcatggtctcaatctcctgacctcgtgatttgcccaccttggcctcccaaagtgctgggattacaggtgtaagacaccacgccccaagtgattttttaaaccatggttatccaccccatctttggcaggtcctagactccaactatcagcttctcaggtttttaccttaaggaattggcaaattccacctcaaactttttttgagataaaagtggtctcaaatacctagcttaccttaatggattttttgcagagacaaggtctcacagcattgcccaggctggtctcaaactccttggctcaagcaatcctcccacctcagcctcccaaagtgctggagattacaggtatgagccattgtactcagtctagaatctgatttgttatgatggtttccatattttaatctgtctctttttgcacatatgctgttatttatttttgtctttctcttcagagggaaacttgctgaggatttgcattgactttagttgaagagaatatggtttttgtttccaatatttccagtcccttctatgaagtattgcaaaaaccaataacttgtatttaatctagactttacatcaaatttctactttacagaacatttaaaagagcagaggagaaaatatggggatgcctttagacaaatccagaatttagacacctaatttgacatttttatttccccaacagttcaaggaaataaaaaatggtggtggtagtgctgtgtgtgggagggtcggggtgggggcacagttttagagtaaatgacttcttggtgagataacaatcaaataaaatggatcaaaatattcggataatgactggaataaaccagctgtaaaagtacttttcccccaaaaaacaggattcaaattgggatgcatattagataatactaagaattgttaattttatttcatgaggtaacgattttgtggttatgttaaaacatcattatttttaagtgatacaaatagtattgggaagggataaggccaggaatctactttaaaatatttcagtaacaaaattcaatagtcatagatattgcctgtatggcaaaatgttgggaagtgttgaatttagggtaggcgcatttggtgtttcatgttatcattttctttttttatttttcttttttgtttttgagatggagtctcctctgtcaaccaggctggagagcagtggcgcgatctcagctcactgcaagctccacctttttgtgttaatatcgaaagtttcattaaaaaatttttttcctgcccagaaggaaagtggtaagtacatacttcctgtagtttgacttgttatagttatctggagtccgtctcccatctcaacctacccacctcttcctgaataaccgtaaattcacatggcttaaacagatttgtagaaaagatacgtttatgttaaatatgtgaggtcaacgggcaacagaggaatagccaatttgaagcctgatttgaacgcaaaaaatttcaagacaggagccattttccatatcatattttctaaatttcctgccagtacagcttccttcatttttcagatacaacttgctctttctgtgcttgatttcaagactgatttgtccttggaattccttgtggattcttggcatcttgaaatcaattgtccgtgccagatagcataagcagaggtctagatgagtacaggcacatataaagaggcaacggagttaaaccacgtctgagattccatattccttaaggttatgtccagtggacagcccaactcccttttagaatcttgtttcttctcatactcatcacttttccgctaaagtgtgtttcttttcatactaaaaccttcgcttttatccccaaatagttatattttctttatatttccacatgctcgttttttcttgaggaaaaaaattacaaaaataaaaagcccaagcgctcatcgcgctagagaagtgaccttcagtttgaacgccctgaaccaacagaatgagctgcaggaaggcggaagcactagcgtgctgggcattctgggaactgtagtcggaagtattttcgcccaggctggtggagtccttgtcgtcattccgcttaaacattctgggaagtgtgggtcagacgtttcatatagtcgacaacacttcctcttcgggagtacagggtgtggccctctcgtgtgactccggactctgggaagtgagtcgcaggaacttccgctccagggaaagttgcggccatcatgctgcatgtgagacttgagccccagcgacgcttctgcgcctcctcagcctggatgagggaccaaagatggtcaaggccctctgtcttgaggaggaaaagtggcagccggcggaggattaggattggaagtgtttgcgtttccctcgactcagtagagctttctagtgttaggggatgttcctgaatcccgggttggggaatgaggcagggtcttgcatcattgggtttgatggtttcttgggtcctgtactcccgtagcccttctgttggacccaccaatcagcattgccgcttcctagggaagtttttgtggcgttggaaatattgtgtaacttgatcgtgttggtagttacatgtctgtacatatttgttaaaactcattgaactatacacttaacaatagtagactttataatgtatgtacattgcacttcaataaatgtgactttttaaaagtgtctggaactttattttttttaagtggcaggacctcattacaagtaagttcagaactaagttaggactactataatcctgctagcaccaccctcatgtaaacattttcattttggtttattttatacatatatagatatttgctttttattaaataatgtgtaaattttaaattagtatttcagttagtaatataccataagttaattttgctgtttcccacattcttcataaagttcatctttaatgattgtgttgtattgaattgagtgaatgtgcacttgttaaacctgggcatctgggatgtgtttaaaaattattctcataattttatatatatatgaaatgttttacaatttaagagatatatgctgacttccatgcctctgttcatcgtttttgtctatcctacttggggtactcatttccatggtcatactataggccttaaattagcaatagctgcaatccctccatagtctccatttaaggcattacactctgctctacatattctcttgccagatcttcctgtggtttactgtgatattgacttcatcaatttctacaattcattgatcctattgcattttcaatatcccttattcatctcatatcctcaataccaaccatatcttttctcttctttctagtataaacagaagacttacacttacatctaattgttcaaaatattgtcctatgacaaccgtagacttaaggaacattaagaaagtattttgattttcccccattattttatagaagagacatgcagggtcaaagggattatgaatggatgctctgtgagccagtcaatagcatatgtcccaaaggctacaggttaagtatattacctggcccagcagctttaaaatcatcttttggtctcctactctagacagcaaacttcagttcaggcaccagtgatgctattatgtgaggaatattgacttgcctctgtttttgtttttaaataacatcagatttggtatcagttatcacttaaaagttatatgtgagacactttctcagtgtatgtgaccttggctgggaagcattgctttagaggtgcagagatcagagatcagataactttgataactcggtatgtgcaatggtagaagtattttaaacatgccatgaaaggggatatttcaattcatagcatctatttttggggaaaaggctcccaaatagtattggctcagtcagtcagatcacttgtttggagatagggttggtaatatgactctatgcactgtgcatactcttagattcaagggtcccattcaaggaatttatattatggtagcactcatttaaagatcaagaaaaaatggacatgggtgttcactaaagcatacttttgtgaacccaaaagtatgtgagacaggtctcaatccatttagaacatttagtttgccaaggttaagtacgcacctgtgacacagccttaggaggtcctgacgacatgtgcccaaagtggtcagggcacagctcgattttatacattttaggagaaatcaggcatcaaacagtatgtttaagttatacattgcttaagtccagaaaggcaggacaatctcaaatgggagtgggagcttctacatcataggtagataagagacaaacagtggcattattttgaggctctgattaggcttttactgaatacaaaactcacacgtgagaggtgggtagacgaatagtgacttaggtcttaatgttgcttagtgaatatgcattattacagaaacaataggtaacaggaagcaatcagatatgcatttgtttcaggtgaacagaggaatgactttgagttctgtctgtcctttgtcccacacctgtgaagataagctatcaatttacattaccagggtgaaattcaacagaaatgcttttggataaagatgttcaggcccacagggaatttccttgttgacaaattgtgaaggaggtatgtagctttttcttctttatagctatcttattaagtaataaaatgggatgtttgcctgacacagttcccagcttgacttttccctctggcttagtgatttgggggtcccgagatttatttttctttcacattttgcaagactatggatgcttaatagggtgagattagcaattgaaagagaaaaaattttgattcttaaaatcttcaccctttccctcaaactctttgaaccttgttcttcttctaatggacatttgtgtgcatgattgaggtgtagtatcttaggtgctgtaggaaacagtaatattcaagaatgtgctgtgatctgcactaaggaggtgatgctactgaacaaggccaaaataaatctacctatggagaagtattcttgccgaaaacgatgaaccttaatctcatctgctctctaaatctaaattgtagtttaccagagccacaaaagatattcaagaaaatgttaaatggcagcataatgaaacatttttaaaaatccagaatgtgggacatcttacttgacaactgaactgatgtcttctataggccaaaagcatgaatttaaagtggatcaaaggggggatactcttccatattcaaagagactcaagagagaaaacaatcacatgcaaagaatgggtatttttgagatgactggaaattttgaagtttcgttttgtagggtataaaataatattaaggaattattaactttcttcagtgtgatagttgtatttttgttatattagaaaatgtaattctttgaagtatgcatgggagtgtttagggggaaaataatacagtgtcatgattttgttttaaaattacaataacaaaagggcagaaagacaatattgatagataaaggaagtgtggcacatgttgaaaattgctgaatctcggtgatgaggtgatggaatacttcactctttacttctattaatgtttgaaatttttcataatataaaggtatgaaaatgtttagttcttgtccagaagaaaagtggtaagcagaaccttcgtgtatttttatttgttggattttctggatttgcgtccaactgtcaattgactcacctgaatgaaatacagttattattgtatttatgataataagaatagggtggaagtgggtgatgtgatatttgaacttgaacaaaaagaaatttcaaatttttatatatttatctcttttcatattataataattcctccacatgaacacacctcctttcattcacttcatgagccatgttttataatgaacaattaaagtcaaggaacacccaaaagcttttgctgcttctgctttatactttaataaactttgcatgaccttcttgtgggtcttatcatggaatgaatagcttatatctgataacaccgccaagagttctagatgcatccagcacacatggattaaagtagaaaatccagtcaaagtaggtttgagatcttgtgttccttacattcgtgccccgtttctaagttctgcatttttagctcacacatatcttcccctttataatttatgcctccttttcatttcaaactgtgttctctactaaagggaattgggtgggggacagggtgggagtggcgttcaaatacacttgttttgtcacatgtgaaagaaaaaaaatgagaataaggaaaaagaaggctgagcttgaccagtgagatagaatgattcggactgaacctagttatccaaaataaaaagggaaacgctggtgagaagcgctacctgaagaggattctggaaactggtccaaaggattcacggcgtcaaaaccacttctgttccaggaaaggtggctttaatgattgggcttctgggggaaatattaagtataaattagaatcctgtttttggagacattttggtttaaagaagacagtgctgagtttgcattctgctctagaattgtgtgacatacagtccaaattcaaacggtagtagccagccctccgccagagaaaggcaacgacattgccaattctttgcgaggattctgggagcagtaaccttggagctctgtgtaggcggccaggcttctgctacaggagggcgtggctgtgacgattatctcattggggattctggggttataatccaggaactgtgggtaagtacagtcacttctgctccatgaaagtgaggtcatcattcgtttcaggaagttgagtgaggcctgagacagcaatgtttcgtttagcctggcggtggccctccttgtcttcaagaagagcatccgtggctagcagtggaagatggggttgggccccaggtgagtgaccctttgtcgagtttgcagaatttagtcttggcgggttgagaatctcttgtattttgtgcgctctgttcctactccaggactgaccaggcagttctgccaccttctaggggtgtgaaattgggaagtaattcaaactgtatgtgcctagcattccttttatgtaacatgaggggaatagaagtaccaaaccgatgcagttcagtggagaattaaatgagatagtcacaagtaaaaggtggtaagtgtggttcattttattaattttcttttaatttcccgagaagccccagttacctaaaagcttctgtgagcctgggaagggatcagagttccacctgcagtgctattttgccccttctttctgatccttacaggaagcaggacgattcctggattccctttttaaaaaagtgggggtgggggtgtggggatgggggtggggggtggggcgggaatcactccaggctattgtatggggatgtcctctgtgattcgtgcaggagggagacatagttctggtttctcgcagatggtcacaggaatgaggaaagaatgactctttggctcctagcagcagaatcttaactgagtatgacttagcatccttcttcttgctgtgtcatctctcttctcagggcagaagatatttacgaattagcacattctgctagcacatctgtgggaaaaggtaggaaggaaggagggagggtgggaaggaggaaagaagatccactccttatactggaaaaaaaggagcaatatacttttcctcaaaatgagaagtcaagcccaaaagaattctgtacagaccaccttaaaataacatctttcaagcctgtctgcatgatttagttgcttctttttttaaaaaaaattaatttatttttattttgtagagacacggtcttactgcgttgaccaggatggtctcaaactcctggctacaggctatcctcctgcctctgtctcccaaagtgctgggattacaagcatgagccaccaggcctggcccaattgcttcttaacaacttactattctttgttcactacagtgtatacataactgactttttctttggagcttcattttgtaatgaaggctctggtcacatgtaagacttgtattaaataaatttgcctgctgttctgttaatctgtgttatgctaatttaattcttgagcccagctgggtcctggagaggatagagtgaagttttgtggcagctacataagtcaatgaaattggaaacagaaaaacaatctttaaaaatcaacaaaatcataaccttattctttgagaagatcaatatagtttataaacctttcaactgactcacccacagggaaaaagaagaaaacaaaaatcaggagggagggaacgttattacaaattttgcagatactaaaaggattataagggaacattacaaacaactctttgtccataaattcatcaatttacatgacatggaatattgcttgaaaggcacaaactaccaaagctcactcagaaagaatggataacctagatacttgcgtgtatgtatgtgtgtgcatacatacaatttttacacacacacacacacacacatatatatatgcacagttaattttttctatcttttgtagagatgggtttttaccatgttgcctgggctggtcttgaactcctgggctcaagcgctctgcccaccttggcctcccaaagtgctgggattacaggcttgacacactgcacttgcctggcctgatatatatttcaaaactgatttaatagataaagccttccaacaacaacaataaaaaaaccaatattgagatgaattcattggtggattctactaaacatttaaagagtaaagatgtgaattttaaataaacccagaaacaaaaagagaagggaacacccacccacccccagcttgtctcatgaggccagcgttaatctgataataccaaacaagacaaagaaattacaaggaaagaaaactacagatgaatatccttcatgaactaagtgaaaaaatcctgaatacagtagtaccttggtatcggtggggaattggttcagggacccttatggaaatcaaaatccgtggatgctcaagtctgttatgtaaaatggccataatattctcatgtaaccttttcatatcaccctgcatacttcaaattatttctatccctacacaataaaaatgccctgtaaatagttgtcatactatattgcattttttatttgtgttatttttattgttgtgttgttaatttgtatttttttctgaatatttttgatccctgtttcattgaatctgtggatgcttctgtagtatccactggcatgaagacctagatgacagagactgaggtgaccacaggacctggaaagtgagggaagaaatcctgggaaaaagatgtcaagcaaagaattgccccttattctacattaaactctgcccaaatttcagactgactgacacccagaatgtataaagacttgtacaattcaatattaaagagcccaacatctcaattataatgggcaaaatttgaacagttactttacaaaggaagacatacaaattgttaatatagcctgtgaagaagtgtgacattattggtcatcaggaaaaagcaaatggaaactgcagagagatgcaactacacaaccaccagaatggcagatattaaaaatagtgatagcaggccagccgcggtggctcacacctgtaatcccagtactttgggaggccgaggtgggcggatcatccaaggtcaggagttcgagaccagcctggccaacatggagaaaccccatctctactaaaaatacaaaaattagccaggcatggtggcaggtgcctgtaatcccagctactcaggaggctgaggcaggaggatcgcttgaacccaggaggcagaggttgcagtgagccaagatcatgccactgcactccagcctgcatgacaagagtgaaactccatctcaaaaaagaaatattaataacagcaaatgcttattaggattcaaaacaatcagaaattgcatatattttgggagacagtgtaaaattaatcttttgggagatgatctggtgttttcttaagcagttaaacacaccaagcaattctaatcatagatatttattccagagaaaagaaagcatatgaccacaaaaatacttttataagtatgctgcaggatctttattcataaaaatatttagacaattaaaatgtaagcaagtttccaaagacatatattcatgcaatagaacatcactcagtaataaaaaggatcaaataactgatatgtgcatcaacatggatggatctgaaaaacactatattcagagaattgtaatgcagaagagttcttaccgtatggttccatatatttcatattctaaaattagtaaaatttatggtgaaaaagtggaacagtggttgccactgggggaaggggttagagattgactggtaagtgtcatgggggaatctgtcgggtaatgctaatgttctgatggctaagtaataagtaagatagctagatggatgactaagatgtaaatgttgctaattttagaatttaagctgagaatatatgggtgactactgtataattcttccaactcttctttatggtataaaatttcagagctaggcacagtggctcctgcctataatgccagcactttgggaggtcaaggtgggaggatcacttgaagccaggagtttgagaccagcctgggcaacatagtgggacccgatcttagcaaaaaaaaaaaaaaaaaaaaaatagccaggtgtggttgggcacacctatagtcccacctactttggaggctgaggtgggaagatggcttcagcccaggtggtcaaggctgcagtgaactgtgatcatgccactgcactctagcctaggtgacaaggtaagaccctgtctcaaaaaaattttttttagtaaaatattgagaaaaacctagttttgagtgaaaaattttaacagagttttataacacaagatatatatatatgcatccgaaattccatacatttgccaaaaagacataccagcaacaggcacacattaaacagatcgacctggctactgatgctacaggggagaaaatgagagtgggtagtgggggatataatggaacaaataaataatatctgtttgtttttttctttctatttttaatatgtatgccgtcaaacattcccctattcaaataaatgatagttttatgttcacattttattcagtatttctatgtaaataaactaggaagacggtctgtggaagctttatctgtgttgttgccaaaggtctgtaatatgtcttgaagaatattttccagaaagaatttagaagtgattcacaactgaatcttgtatgccaagaatagtgcacatgaacaaaacattctctgaccatagaaggatcaatcttttcatttcaaaaccccagagattatttttatattttattactacttttaatgttgcagacaataattaaaatgaaaagcttattttttcattcctttgaaattgactcaattctttagtcttcagccttgccattaaaaaaaattttcaatgtctacaagtgcatctctaggagtctcttcctcctttttctcttactcttcctctcctacttctcctcctacacaccctggccttccacccacttctcctccatcttcttctcctccttccaatatgtgattttgcccatttggataaattgtttattctctcttaatgatttatttattacaatctgcttccttctctaatcttcattttttctcattagcttataagatacacctgatcaatatgttcatatccattatagagtttctcattatttttagtccttccctctaagttctgaaaaaagttctatgccatatattcagtttcctttgaaacatatcattgattttttaaaaaatactttattttaagagcagttttagggttacagaaaaattgcagaaaaagtattaatatttcccatatgctctcctttcccctgcccagtttctcctattgtttgcatcttgcatgtgtgtggcatatttgttacaactaatgaaccaatatcgacacattattattaactaaagtctgtggttgacattagggcttactctttgtgttgtacattccatgggttttgacaaagcataacatcctatatccaccataccatatcatacagaatagtgtcactgcttaaaaataccctgtactctaccaattaatctctctgaacctctaacaaccactgatcactttactgacctttagttttgccttttccagattatcatatagttgaattacagtatgtagctttgacagactggcttctttccattaacaatatgaatttaaggttattctatgtgttttcataacttcatatctcatttctttttatggctgaataatactctattgtattgatgtaccatagtttgttggtcatatatcattgatttttacagattgaaatatcacttacattcagaaaagtgtccaaatcataaatatacatgtgaaagtatgaacataaaatgaacagctgtataatcaccactcacaaccaaaaatggagcatggtagaattgcaaacaccccactctcacagcatcatgatgctttcttccccaggaaaagaaaccgctaccctaagttttaaggttcccttgcttttctttatatttttactatttaattgtccaaaatcatcctactgatgaattttgcatgtctaatgaacaagtggaatcacgctgcatctactgggtttgtctagttattttgctcaacatatttatgggagtcatcatggtattgcatgtacagctaaagtttgttcaatgtccttgctcttaccttgtgtaaataacaaaaaatatttatccatactatcatcgatagacatctgaagtattctcagtatgtcattgtgatgaatgatcctgctatgaacattcttatatgtgtattttggtacacatttcttatgggtttatacactgagtagatttaagtgtcataagaaatgcttttcaaattgtgctctacaatccaccagccttagattgttgcatgtagtgggaggtataggtcaatttcagttttatttcacaatattcaatttaacagcaacatgtgttgaatatttgccctgttcccatggtgctgcagtgccacatttgttgcagatctgaagtcaacatgagcatgcatataaaattcaaaagatctacacataaaatattaaaattaattagattagttggcaagattgcaggataaaggagcaaatgtggtatttagtagaaatggttggagtggacatcattattttgttccccatcgtagaggaaatgttttcaatatttcactattccttttggtatttgttgccatttttgtagatctttactattgcttagttgcctaaattttcttatgacaaatgggtgattaatcaaacttttttttttctgtttctgatacctaggtcatgatgtgttacccttttatatatgattggcaacattttgtttaggatttttgaaagtatatttatgatgagatagacctgtcattttctttttctttcttttttcttttctttttttttttttttttcttgagatggagtctcactctgtcacccaggctggagtgcagtggcacgatctcagctcactgcaatctccacctcccaggttcaagtgattctcttgcctcagcctcccaagtagctgggaatacaggcgcgtgcctccatacctggctttttttttttttttttttttttgtatttttagtagaaacggggtttcactgtgttggtgtttgccagaatggtctggatctcctgatctcatgatctcctgatctcatgatctgctcgccttagccccccaaagtgctgggattacaggcatgagccaccgtgcccggccagacctgtcattttctattgtaatgaagcctctcacaaattttgtcagtgttattatagtggcctcataaagttagttggaaagtgtttcctattttgttattctgaggaataattttgagatgaacatggtttcttctttaaatatttggtggaattcactgatgacaccagatttcaatgccatactcttttatctatggattacttaaaagtggtttaatttccaaacaagtttataatttagggtccacctagaagatagaaaccttaccaattatttgaaaagaaaaattagcatattgtagagttggtagctagatttctgaaagagcagaaaaagaactctgggccagatgctgtggctcacgcctgtaatcccagcactttgggaggctgaggcgggtggatcacgaggtcaggaggtcttgagaccagcctggcaaacatggtgaaaccccatctctactgataacacaaaaattagctgggagtggtggtgcatgcctgtaatcccagctacttgggaggctgaggcaggagaattgcttggagccgagacgcaggggttccagtgagccgagatggcactactgcacttcagcccggggaactgagcgagactatgtcaaaaaaaaaaacaaaaaaactctaatatatgatggaagtagcaactgcaggaagtagcaactgcagcaagcagcaaccacctgaggtctgaggaaacaaagtgaagagacaggaattactaaaacttagaagcttggaggaaggtcatgctcacctgaaactcagacctctaaggagaggccagtgttcagctggctctgctgtctctgagctcagaaacagggccctgcaattttagcacttagacatctaaggatcagtctttgggaagctgtttaataatgtttataaagagccatgatgaaataggtattcaagtgttagaaaaactgaaaattaggcagttgctacaagaaaaagtactgctggctggcaggcacaggatacagtatatctccctgcccccaccacccctatactcttctgctaatagttgccgaacacagaaccagattgggggtgtagaggtcgggaaagattggctgcagactcccccattccagccccataaagcagagtgaagaatggtgggtttggagatgagacaatatttattaaatgcacacatgaatcatttagttgtatttttattgatttctagccaaatttcactgtattcgaaaacatagtatttcagtattttgaaatcccatatcattttactcatttgtacaaatcttatgtgcgcctgaaaagatgtgcattttaatttttgctagaatctttctttcccccagcttcatataggtgtcaaaagtgctgcagagattctaggcttttcagatcctagactagaccatcatccccaggagaaaagtagccccaaatgcatgactctcccaactgtttctgaattttggcccaccatttctccattatcttgtcttttgatgtcttttgacatttaaaaagtttgctcacctttcctctgctacatgtttgttccaaatcactcattttattattactagaagtggaagtatacaaaatattattctgtcccttttatttttaaattttcattttttcaaaaaaatcacctattatcagattgatcctctttaatatgtaaaccgtatggattttcaaaaacatttccttggaaaggagttaaataaagaatcaaatagtttcatctcttaatagtgtcttttaagccactgagcgttttcacagattggtcgttatgtctttttattttcctcttccttttctggattgagtgaacccattcaccgtcttccctgagtcatcctccataagacaacttacaatatttgctatatcaagagcagggtgaaaataggtgatagatttttctcaaagaagaaaaacatttcaaggttttacaagggagttatcccttcccataataataacattttgtctgtatcagtacagcccttctatttgccttatgacttgcatttcatcatcagtagttaaagcagaggaaacgtgggaaccacttactgtttctgcttatggcctcatcaacggttgcatctgttttttttttgtggattcttggcatccacgttcttgtggatcttgcaacaaacacattatggtaggtagcagcagcactatcagtttcagacgcgtccacaccaaaatggaataaaaaagtaatccagtcaaagaaaggttgagatcctgtattcctcaaattcggtgtccagtacaaatcagcccaatttcctttaagtacctgcatttttagcgcacacatcccttccattctgtaattctttttttttcttcctgtattgcaagcttctccgttctctcctttgtgggatattttcttggtaggtaggtaggaaggtaggtaaagtccgctttggttgagtttatttgggtttgtgtagcgtttgaagaaaaataaattcaaactctagggggaagggagtagagcttgactagcagtataaaattagatggctaaccaaaagagaatagtgactatataaatactgactatccaaacgagaaagagacgacttaaggggaagtgctgccctgcaagaaattccgggaattgtccagaagatccacagggtcagagacacacgcgccaggaaaggcgcctttcatgcacggtcctctggggaaaacagagaaatatatataggagctctctgtctttggaagcatttcggttccaggaagggagagttaaggaattcctctgggacaggcacatgtgaaatatgatccaggctctccgcttggcaccctgcacttgcgtcctaggcaggcagagagtggagagtttttctaggaattctgggaagtgtagtttgggagccccgtgtagtcgtgtaacttccgctctaggaggctgaggccgtctccctgatcccgtcgagaattctgggaagcgtagtccaggaggtctcagtagggagagccacttccgcccaaggtacgctaggccgcggccttctttcctcccagaaaggtgaccctccccgccctgcgtcctgctccttccgtccatactgatgttcgttttgctggaggccagtagcaactggacagtagccctaggggaggagaatccacctgcggcgaagggtgggatttgttttctttgagccttctccagtgtggggcagctggcgcatctccacttagcgcagggggtccgggatcctacatctcagggactggggatctcctgggttctgtactcccccagccctttcccctgaccatcagccagctctgccatttcctagcagtataataaaaggcgagtatcttaatctctctgcctatgtttctttttctttaaaatggtactagtatctatctaatggagttcttttgagagttaaataaaaaggcttggaacagagcctgacagatggtagaagatgggtctcttgttattagcactttttaattttctgagaaggactcagttccctgaaagcttctgtgagcccaggatggggtcagagctccagctgcagagtatccctggcccttttctgatcactgagagatttttctttaggagaggatcactccgggctgtctgggcagtccactgtaattcatgcaggagttctgatttctcccatcctcctttccttctttagccttgacttcttgaaaaaggcttcagggagaaggagggaataaccctttggcacttggcagcggagtctcacctgagtagtacttatcatcctttcttcccaggggagacgatatttccttcattcattggcaaattctgctcgaagatgccctgatatttgttcaataaatgcagaaacggatgagggagaacttgggcatgagtaataaagatagtatttaaacattgagtgctgatcattctaagagtttgatatgaattaacatatgtaatcctcacaagagccctttgaggctgggttgggtgccaccattcccatcttaaagaaaagcaaagagacacacagcatagatggtttatctttaggtcacccaggtggtaagagcctgagctgagatttgaattcagatagtttccatccattgccttagttcttgatgtgtttagtgtcagcttcagaagacatgtttggatttttctagaggaccgtaaaagcgaggttaatgagctttgaattttttattttttttagttatctgtaatttaattttatttgaaatatttacgttcatattctgattatataaatgattgcatattgtaaaagattaagaaagtatagaaagagtaaaagaaaaaaattaattatgctaaccacaagatataacaataacaatattaattcaatgttttcctcttccagtagacttctttttggatttttacccacgtttaaccaaataggcttcatagcttttatttttcccttaagtttttactatggaaatttataagcatagccaaatgtaatatgactaaaataattctgtggaagcatcacccagcttcaacctttgttaacatttgcctgtctcggatcaactccatgcccctttttttttggtttcagtattttaaaccaaatctctaacatcgacttagtataatattgtttgattgattgtcataattgtcaaacattgatgatcataaattgcttatatccaagaccgtgaaagggaaatgccagcagctactctaaggttttcattcgttgcagcttacagaatggtccttacttgaggacgctagaggacgcaagagagttgtaccttggagaagaatggtgctgaattttgtgttccagtatagagtttgccttgcctaagtcttatagctcttcgtttcttatttatctttatctaatccatacactgaaagttcttctatttctgggaccatgtcatatttttctctatgtgtccaggacatcgtacaaagttgttaagtgtttatggttagagtagctactcaacagacagctggcatcaaggatttgcagtgtagaattggaattaggtatcaaaatagaatagaaataacccctggatatattccttaatctcacttaatattggtaggttatataatccaccaactatttcagagtattgaagagttgaagagcaatgattggttatgtttcgataatctaaaaaaaaatccctggaaacaaattgttagaaatgataacaacatttatagaccatgccttataactaagattgtgtttccaggtttttaaaacaggtttttaagaaatgtttctacagtaaaatagactattttgttatttttggtgtacaattctattacaacacaggcatagtttgtgtaacgactaccgtagtcagaaaaagaacatttccatcaccccaaaaactccgctcatgtcttccctcataattacccctcaccatacctgtaaccactggcaactaccataagcactaaaactctacagctttgtctttttgagaatgtcatataaatggactgatgctatatgtaacatttgagaccggattcttttactcagcaaattgctcttgacattcacccaagttgttatacgtatcaatacttcatttcttttacttctggttaacggaagtatccactttatggatatatcacagttcatctattcactggttgatagacttttccccccactttttggcatttatcaatagagctgatataaacattcatgtatagtttttttgtgcttatttctgtagcatacgaagccaggagtatgtttactgggtcatatgggaaatgcatgtttaactttataagaaactgtcaaactgtagtatctgtaccattttgcattctcactaatgatgtagaaatttccagtttatttacatcttcatcagcacttagtattttccttatttttttattttagccattctaagcattgtgagtttaatttacatttccctaatggctaatggtgttcagcagatattacttttttgttgttgtttctttgccatccttatatcttctttgcggaagtgtctgtatgcatgctttgcccagttttacattgggttatatttttcctattgttgatttttgaaagctatttatatattctggatataagtccttttttggatgtgtgatttgcagatatttcttctcagcctgtagcttgtcttttcattctcttaatagtgtcttttgcagaacaaaatttctaattttaatgacatctgatttatcgatgttatcttttttggattgtgcttttgatgtcatatctaagaagtctgcctagccccaggtcatgaagattttctcttgttctagacgttttatggttttacacttaaatctgtgatccattgtgagttaactttttaataatatgcgatggttaagttggggtttatttctttacatgtgaatgaccaaccatcccaacaccacttgtttgggtttatttctgtactatgttctgctaaattgatctatgtgtgtatctcttcaccagtaccaagatgtcatatttactgtagcttgatagtaaatcttaggatagtttgattcctccaaatttattcttttttttccaaaattgtttttagctattctggttcctttgcctttccatataaatggaatgcatacctttccatgcattttagaatcagcttatttatatctacccaaaaattcagctggtattttcattgacattatgtgaaatcagtagatctgtctttctcacattgagttttccagttcattaatataacaagtccgttcatttaagtgttctttaatttcttgctttagtgtttcatgattttctgcatacagatctatacatgttttgtttagacatatgcccaagtataatcagccaactggtcttcgacaaagtaaacaaaaacataaagtggggaaaggacacccttttcaacacatgattttgggataattggcgagccacatgtaggggaataaaactgcattctcatctctcaccttatacaaaaatctactcaagatggattaagaacttaaacctattttctgaactataaaaattctagaagataacactggataaacccttctagacattggcaaaggcaaggatttcatgaccaaggacccaaatgcaaatgcaataaaaacaaagataaatatctgggacttaattaaactaaagagcttttgcatggcaaagggaacagtcagcagagtaaatacacaacccacagagtgggacccctgaccctgaccctgaaccctaaccctgacccctaacccctgaccctaaccctaacccctaaccctaacacttaaccctaatccctaacccctaaccacaaccctcaccctcaccctaacccaaccctaacccctaatacctaacccctaacgtctcttaacccctaacgctaaacgttgactcctaacccctaactctgaccccaaccgctatctccaaaccctaaccctaaacttaacccctaaccctaacaccaaccttaaccctaggttcgttactacgttggtattgactatgtcaatgttgattattatgatcgctgtcttaggactgcacggcagcgaggggattgcggatcttatattaatatttttgtattgaggcagtgcattagcattacaggtgcttgttacatgagcaatgggggtgtcatattttgggtgtcatttctgcattaggaatgctgcatttgtcttctgaggctgcggtgtggatctcgcactgcggccgcctcgccttggctggggagaacctcggtgggcaggattcagaggggattttggtttcccgttttccacactgaacccctctaactggtctctgaccctgattattcagggctgcaaacaggaaggattttattcaccgtcgatgcggccccgagttgtaccaaagcgaggcagtgcccccaaggtctgtgctgagcagaacgcagctccgccctcgcggtgctcccggcccgcccgcccgggtctgtgctgagaacgctgctccgccttcgctgtatctccgaagtctgtgcagaggagaactcagctccgccctcgcgatgctctccgggtctgtgctgaggagaactcagctcagccctcgcaaaggcccagcgccggcgcaggcgcaggggcagggaggcgcccagcagcgaggcaggtggcaccaccagggggccctcaagcctggcgcgcacgcattccagacgacacccagaccatgctccgccgcctgggcgcccaagctgcagtcgccctctgtgtgcaggcagcagctgcctagcaacccccgagcccgctcgcgctcccagcatcgcagaaccagggccaggtatcccagtggctgcggccaagccaggcgttctgcccggcggcggcggctgcacaggagccagaactgagaacccgccgctcagccccactcggggtgactgccgagtgcccgtgccagcggccccgatctccctcagatggaggagtgggcgagaggcacggcctgggggccctcaggctgggcgcgctggcgatcccaaggccgaccaggccatgcacctccagcccgcctgggcacctaagctgcagccgccttctgtgtgcaggcagcagcctccaggcaactcccgagcccgcccgcactccccacatctcggaaccagggccagatgtccctgtggctgcggcgaagccaggcggtctgccctgcagcagctgcacgggggcgggaaccggccctcagccccatcccgggtggctgtagaggacccctggctggaggtctcgagctctggcagaggaggacccgggcgggggcagggtctggcgggctctcaggccaggggcactcgtgatccagaggccgcccaggccatgctccaccacctgggcgcccagctacaggcgccgggcaacttccaagctggctggcgcgcccagcctcgcagaaccggggctagatgtcgccgtgactgaggccaagtcaggcggtctgcccggaggcggctgcaccggggcaggaaccgaccctcagccccatccccggtggctgcagacggcccctggagcggccccgatctctcttcggaggagaagaggggcgggagtcacggccaggggggccctcaggagggaagggatgagcgcctgcgattccgggaagtcccgcgccagcccaggagaacccgcaagccagcggcgcctgtttctctgtgtgattctttgaggaaccaccaaactgttttccacagcaagtgcatcattttctgttcctagcagccagttcatgagggctccaatttctccacctccttagcaacattgattttctgtgtcgttgttatgaaagccttaccagtggatgcaaagtggcatctcatttgggttttgtcttgcattttattaatgaataatggtgtttagcatcttttcttgtccttcttagacatttgtgtatcttctttgaagaaatgtctattcaagtcctttgcctcttttttaattgggatcttagaaattctgttgttgagttgtgggatattaagcttttatcagataaacacattgattttagcagatacatattttctcacatactatgggttgtcttttcactcccttgatagtatcctttgatgcataaagggtttttattttgattgaatctaatttacatgtattttcttttgttatctgtgcttttctgtcgtatttcaaaatacacttaaaactcaaaggtcataaagatgtactgtgtgttttcttctaagagttacatatttttagtccttacatttaagtcttttattaatttagaattaatttttgtatatactgcaaggtaggggtctaacttctctcctgtgcactgacatccagctgttgaagagactgttctttcctctcttgactagacttggccaccttgttgaacagtcattgaccatatatgtgaggactaatttgtaggatctcaaatctgttctattgtattggtctaaaagtctattggtcttatgccagtaccacactctcttgatgactgtagattggtagtaggctgtgaaactgaaaaatgtgaattttccaatgttctttttcaagactgttttgtctgtcagatcctttgaatttttgtatgattttagaatgagtttctttgtttctgcaaaaatgcctttgggattttgatgatattgcattgaatctgtagatactttagatggtattgtcatcttaacaatattgtcttacaacccgtgaacacagaatgtctttccagttatttccactctctttattttttttcagcaaagttttgtgtataccaccatggttacatttatgcctgaataacttattctttgatgctattataaatggaatttttaaaatgttttcatagttatttacaactaaatagaaatatagctcatttgcctatgtttgttttgcatcctgcctcttttattagttataaatggttttgtgttttgtttggagctttatacccataagatcatgtgtagatataattttacacctattttttatttctaatgtagatgccttttacttctttgtcttgcctaattgctctggctagaactgccagtgctacattgaatagaagtggcaaatgcaccatccttgtcttgttctagatgttaggaaaacagctttcagtgtttcatcattgatcatgatattaactgttgggtttttgtacatcccattgtcatgttgcagaagatcccttctatgcctagtttactgagtatttttattatagaaggatgttgtatttcatcaatgttttttctgcatcaattgaaacaataacatgcttattcattttagtgttacagtatattacattgattgattttttatatgttgagccacacttgcattttggggataaatctcaaagggtgatagtttacaatcctttgattacgcagtattgctgctagtattttgctagtattgctagcattttgctgagatttttgcttatatatcataagggatattgtgctgtagttctctcttttgtgctctctttggctttggtataaggataatgctgttatcaaaaaatgaattagcaagtattccttcttcatatattttgtcagaagagtttgagaagaaatggtattaattcttctttaaatgttaggttgactcagcagttaatgcagctatttggtcataaatgtttctttgttaatcgcttttgattactaattcaatctcctaggttatagatctgttcagattttctctttcttcttgagccactttggtagtttgtgtctttctagtgattcatccatttcatccagggcacctaatttgttgttagacagttgttcacagtatactcctgtaatccttttgtagttctgtaaagttggttgtaatggctctgctttcatttattattttaataattagtcttccatcttttgctcagtcaatataatgaaaggcttgatctttcaaagaatcttttttgggtccaacaaatgtataccttctgtgtattgatttatgtattcccctgtaatttctccctctctaaaatggaaaatcaactgcaattcagctgctttgcatgcagtttctcaggactccttaaacctgtgattcactgggccacagtcattcatataagctcaaaataagcctctttaaaatccctcaaagagtttggtttttcttctaaaattttgtaatataaattatacgtaaatcatggtagttggcatttttccacgcatcataagttgtctcacagtgaccaaatgcaacttgcagaaaataattggatattatcttcaaaataatagcaatcttacttcagatgttctttatccaacatagatttaatacctaagagataacctataacataaagattcattaattatgtcatcttctccaccattatccatgatgatcacatactttggaacttattctatggagaatagcctaaagtgaagtcataataatgatacattgttatgcattatctgtcttcttcttcttttttttttttttgagacacagtcttgctcttgttgcccaggctggagtgcaatggtgtgatctcagttcactgcaacctctgcctctggtgttcaagtgattctcctaactcagcctttcaagtagctgggattgcaggtgcacaccaccatacctggctaatttttatatttttagtagagacgtggttttgccatgttggccaggctggtctcaaatgcattatgtgtcttctgagagtggtcaggggattcactctagcttaattgtcacttcttacagtgagtgctgaggtttgtattaagattttacattttgaatgtatttattaggacctgattacactctcttacgctctgaccaaacaatatgaattctataaattttaattctatatcacttctccaggtacatatcatattttccaagacccattattattttcatggtggagctacaagattcagcaaatagtcatatagaatatacttaagttcaagattctgaaaaaaataatacttttctattatgatatctgcatacttgcatgcaatatgtatatgcaatactttataaatacactaacttttatctattatttatctgaagttcaaatttaactgtgtcttttgttatctctcaactccgatgcatgggaaccttggtgttcttctgtccaagcttagctccaactacctccagagacccattggagaaagacaccagtttttgagccaactactacaattcttataatgtggataccattgtgtcttaaagtcagtttttttcttattattcttgtgtccaaaatgacggtaaaacacaaacaatatgactgtgctgatacgtgttggtggcacctattaattatttggttctggcactgaagataaatatgtgtatttatgagattaatcttttagctcgagaataacaaccacttaataaaatatacaattttgcttttataaactcaaatttagattaaattttttttcaagatgatggattagagacttaaagcatgcttcagccacatggacatagcacaatagtgcataaatgtcaactctctgagctttaatttaagaagaagaataggaatccaccagaatcatgaaggacacaccagatcccaggaaggagaatggaggcaaactgcccccatgatggcatccagctaataaaagtgagtgaagtaccagtaagtaaaatgtattttaaatatattctaaatatatatgcaatatatgtctattctaaatatatatgcagccaacattggagcacacagattggaacacaccccaatgacagtgttagacagatcattgaggcagaaaactaataaagaaattctgcatttaaattcaatgcttgaccatttggaattacaatacacttcattcatcaaccacagaacatacactgtagtatcatctgcgtgcagatgagtatactgctcaaagcgatttacagattcaatgcttttcctatcaaactactaatgtcattttgcacaaaatagaaaacatctaaaatttatatggaacctaaaaggagtctgaatagccaagccaaagcaatactaaggctagagacataggctagagacatcatattacatgacttcaaactatcctagaagactatagttatcaaaacaacatggcactggtggaaaaacagacacatagaccaatggaacagactagagtactagaaactaaggccacatgcctgcaaccatcacatctttaacaaagttgacaaaagtaagcaatgggaaaaagacttttatttaataaataatgcggggataactggccagtcatatgcagaagaataaaactagacccccatatttcaccaaatacaaaaattaacttaagatggattaaagagttaaatgtaaaatctcaagttataagatgcctagaaaagtcctaggaaatacttttcttgcttttttattttattttattttattattattatactttaagttttagagtacatgtgcacaatgtgcaagttagttacatatgtatatatgtgccatgcttgtgtgctgcacccattaactcatcatttagcattaggtatatctcctaaagctatccctctcccctccccccaccccataacagtccccagagtgtgatgttccccctcctgtgtccatgtgttctcattgttcaattcctacctatgagtgagaatatgtggtgtttggttttttgttcttgcgataatttactgagaatgatgatttccaatttcatccatgtccctgcaaaggacatgaactcatcattttttatggctgcatagtagtccatggtgtatatgtgccacattttcttaatccagtctatcattgttggatatttgggttggttccaagtctttgctattgtggatagtgctgcaataaacatacgtgtgcatgtgtctttatagcagcatgatttatagtcctttgggtatatacccagtaatgggatggctgggtcaaatggtatttctagttctagatccctgaggaatcgccacactgacttccacaatggttgaactagttttcagtcccaccaacagtgtaaaagtgttcctatttctccatatggcaaataatttatggctaagtcctcaaaagcaattgcaactaaaacaaaaattgacaagtgggagttaattaaactgagaaactcttgcacaacaagagaaactatcaaggtagtaaagagataacacacagaatgaaagaaaatattcacaaagtacgcatctaacagaggtctattattcagaacctataaggaactcaaacaaatcaacaagcaagcaacaagtaactccattaaaaagtgggcaacaggacatgaacagacacttctcaaaagaagacatacacacaagcacccaacaaacatatgtaaaagtgctcatcatcattatttattagagaaatgcaaatcaaaaccgaaaggaaataccatttcacaccagtcagaatggctttttttgaaaagtcaaaagaaaaacacatattggtgaagatttagagaatagagaacacttatacactttctgaaggaatgtaaattagttcagccactgtggaaagcagattggggatttctcaaagaactgagagttgaactaccattcaacccagtaaccccattactgggtatatacccgaaagaaaataaatatcctaccaaaaggacacatgtagccatatttttatcacagcagtattcacaatcacaaagacatagacttaacccaggcgtctatcagttgtggtctggataaagactcatggaatactatacagccataaaaaactcaaatttatggcatttgaagcaacatggatgcattgtttccagcaaactaatgcaaaagcaaaaaacaaaataccgcatgttctctctcataagtgggagctaaatgctgggtacacatggtcataatacagaggggcgggaggggccgggactggtggctcactcctgtaatcccaacactttgggaggccaaggtgagcagatcacccgagggcaggagtttgagaccagcctggccaacgtggtgaaaccccgcctctaatgaaaacacaaaaattaactgggcatggtggctggcgcctgtaatcccagctactcggggttctgaggcggaaagtcgcttgaacccggggggcggaggttgtagtgagccaagatcgcgccacatcactgcagcctgtgcgatggagcaaaactatgtctcaaaaacaaagaaagaaagaaacaaaaaaagaaagaaacaaacaaaaaaacaaagagggaggagggagggaatacagattgattaaaactatcgattggttagtgtcctctctaccttggtaatgaattcattcatttaattcataattcattcattcaattcataattcagttccccctgagaaaaaaatattcacttgtcattaaaatctctctgtatcttactgatttcagatagaagttaaatttcaccttaataatagacacaaaagaactagttaaactgacaaaaactaataaacgtttgctcaaatttactgacagagtcatgggtacttcatataatagtaacattctaccagttttaagtaaaataaataaggaaacaatcttaatttcatcgcctaccgggagggacgtgcccctgctcccaggtgagtgggaccctgcgctctgggcgggttgcgccccggtctctggcacctcttgttggcagcgtcgccgtttcaggcacagggcaggtatggggggcaggcagcgggccaggcccaggcgactcctttgccaggggctgggcaggtgcggagaggggcggagctgtgctgccctgggtgagggagcctcccgctctggacggttcgccgcccctgccccaggagggcgctgcaggagctgggtggggaaggggagggacgaagggacgcaggccaggccagtggccccttagacctgggtgatacgggagggtctgtgggagaccagagaggacccggagcagaaacagggaactgatacctctggctgaatatttgtcttcttgctgaagtttgaaagtcagttatttcattaaagtttaattgtattataaaaataacaactattaaaaattccgtgtagtcactggaatgataaattttggtgcagtttcagcataacaatctttggagtttttagatattctaattgttcaaattgcggccatgtttcaaaatatatgccatatattgttatggcatccacccctgtgtccctgtgtcccgcatccgcgtctgtgtccctgccggctcagggaacgagcttcttcctccttctgcagactcagatcaggccgtcctccctccagcgcctgaggcggtcatggggacagcctgccctcgaatagcccgataaagcccagcctgtgccctgtgctccgcgtggtgtcctggctcgtgccgctcagagccccgcagaaagcagtgtgacaggtgtggaaggactcagcaccaggcagcggtgagcggatggatgctccagggatgtggggctgctggcagtcaagaacccattgccaaattccatggcataattttggatatttttcccttatatttttgtgtaaggctttcagacttacacattttgagtttttaaaaaaatgtagtataaactacaattctgacttctatattttacatgttgatagcaagtcttcataccgttttttgttaaagggggctattccctctccatagtttggcctttgcacccttgttgaagatcattttgactatatatacaaggcttttgtggagagggggttctctattatttactatgtctacatgtcttgatttaatacatttctttttagattttatcctttttactttttgagacaggttctctgtcatccaggctggggtgctctggtgcgaccatggctcactgcagccttgctctcccaggcttaaacaatcatctcacctcagcctctggaatagctgagactacaggttcatgtcacattgccaggttaattttaattttttttttttgtagcgatgggtgttctcactatgatgcccagtgtggtttgaactcctgggttcaaggaatcctcctacctcagcctcacaaagtgctgagcttacacgtgtaactcatagtgaatgaataaacaaaatgtagtctgtatatacaatggaatattattcagccttcaaaaggaatgaggtcctcttacatcctacgatgtggatgaatcttgaaggcattatgctaaatgagagaagcatgacacataaggactaatgctgtatgattccactcatgtgaaatgataatatatttataataggtctatccaaagagacagaaagctgactagtggtgccagacagtgggaggcaagaggaatgaggagttacagtttagtgggtatggagtttcctttggaaattaaaatattttgaagctagatagaggcaatggttgcatagcattgtgactttattaagtaccactgaattgttaactttaaaatgattaatattatgctatgtaaattttaactcaataaaagagaaaaaaaaagaacttgcccttttgagagtgacatcatcaccatggccttcaccaacatcaccatcgccaacattgccacaccatcattatcaactcctcaaccactatcatcaccaccaccatcatcatcatcaccatcaccaacattgccacactatcattatcatcaccacctcaaccgccatcatcatcattaccgccaccactatcatcattatcatcaccatcaccaggtgaggtgagacaggagaactgcttgtacccaggaggcggaggttgcaccatcaccaacattgctacaccattattgtcatcatcatctcaaccactgtcatcatcaccaccaccatcaccaccaacaccaccatgccagcattatcaccatcatctcaaccactatcatcaccaccagcaccattatcaccaacatggccacaccatcattgtcatcacacccatcaccatcattatcatcactatcaccaccatcatcatcctccttactatcatcatcatcgccaccatcaccaccatcacaaactccatcatcactaactctgcctgagcactcactctgagacaggcagcatgccaagaactctaatagcattgttttccaacaaccctgaaataatgggaattcttattattagccttatttaccagaatagggaaattgaggtatgagaggttaagtgcctgcccatacacagaatagtctccttattcattcactggggatagtactgcccttgcccttgggacatttacacatgcaactgaagccaggcaaagagatgggtgggcctggcccagagaaaacacttgttagacagcgtgagctgtttttattagtgcccaatgtatgagactaaccctcaggccaccatggtcttgggccctagacgagtcttctcttctacagccaccacagtcctgagttctgacaacagagcatgaagcccagaaaaagatcttggcaaattgtttttgaaaatatgaaattcactctatcttagaatacaagctaaaataaagtccatgcagtccaaagagtcaaatgtaaaagaaaggccattggctgggcacagtggctcatgcctgtaatcccagcactttgggaggctgaggtgggtggatcatgaggtcaggagatcaagaccatcctgactaacacgctgaaaccctgtctctactaaaagtacaaaaaattagccaggcgtggtgacacacgtctgtaatcccagctattcgggaggctgaggcaggagaactacttgaaccagggaggtggaagttgcagcgagctgagatcgcaccactgcactccaggctgggcgacagagtgagactccgccaaaaaattaaaaaaaaaaaaaaaaagccatagaaagcacaacgtgagggaatacttgtctgctctgctctcagggtgcaaagtgactttctttataaagaaacaaacaaaaattggaaggaaagtcagcaagaacattgatggatgaaaatcatgctccaaaacaccaaaacaaactttaaaatgcacgctatgaaaaatatttacatcgaatatgacaaagtgttaatattcttccttcatgaagtttatactaaaggtgtcttcctaatggaagtaaaggcccaaagccaggaactggaccagggcacagcactatggcatgtgaagaagagctcagcaaagaggaggacaggacagggctggaaaatgtcacatgcactgaccacagtgccatgtatacctcaggttctcatcagtgacaccaagtttcagtcacatgcaaagacttttgtggggctggatgagctgggagctgaggacagtcccttcagcaccatcattattcatttcaaagacacatattatactacattgccctggaggggagccagttgagctcttgcagcccagaaattagacccagaatccacaccatatgtcagaccccacatccatgtgagaccccaaatccacatccacagccacatccacgctccatgtccatgcccacatccatagtcacagccatgccccatgtccacaccctcacctggcccccaggctgctccaggctgtgctctcactgcagcatctggagcagatgaagccacaggatgacctacaccacgctgacctggttctgcaccatctcagcagggcctcacacacacatggctcatcacacacccctacctgccaggcctttatgggttggtgctgaccctcaggcagaaggtcagaggtcagaccaccaaactcagagtagaacagacagactcagtgctcagttagcagggccagcactccctgaaacatgcctgttcttgggacaagacttggggtgaggggctggagtcaccaggatcctcacagggcctttggacaggagcccacctgaaggattcgctctccaggctggagtttggaagtccaaatgggtctcaatgggctaaaatcaaggtgtgggcaagggcagctccctctggaagctctagggagaatctgtctccaactcctccagttcctagaggccacctgcactccctggctcctggccccttccatgttcaaagccagtgatggccagccgagctctcacaaacatcaccctgactcaaccctcctcctgccctcctcccctcctaaggaccactgtgaggacactgcagctgtgcagacatgcagggcagcctccccattcacagctgggtgaacagccccaactccatccacagcttcccttcctcctctcttgccatgcaacttaaagttgcaggattaggacatgagtgcattcaggggctgttattctgccaaccgagctaaggaacacacctcagcatgacctcaggctcagcatatggacaggctggctgtgccctgtctggaccccaagcccaaacttcatgaggccccagctgtgcctgtgagtgcaaggaagtcctagtctcctcaaactccatccctctggcatcccaggcctcacctctccctctgatgtagcagggacaaggtgccaacagccatggtgagccagtgactcagcacaggaaggtcaggtggggatctggtcctcacacctggccccgccctccatgcagtgcccgcttgtgtggctccaggctctgggccagtgtctgttgcaggatgccctgccctggcacagccaatacacttacacaagcaggggccccttgggggcttcctgcttccagcaccacccacccctgggacacccactgggaggatgaactgggtggcacaggtgacaggcctcaccttgaccaggacagccacctgtcagtcatttgctgctttgtgcaggagaccccaagagactgagagaaaagagaaatggtcacagtgggagggtccttctgctgcccaaataagctcagagaaccaaaggcctcagcaccccaccaccacctgggtgacaaggccagaggcaggggctgcatccgggtcctgcccactggggggtgacaaccgggctgcccctcctcccccaccaaagctgaaggaagtggaccctccacagggatccagaccagatcccctgctggcactgatcctacatctgcatcactgctccaacccccactgcctgtgccaccaaccgtgacagtggccacttggcaggtgaaactaagtctcagggctttcagcttggttctgtcactagctgtggttatatgttgaggagacagcacctaactcctggggctgctgctgggattcagggccccgactgtgcatgctccagcacactgagcttcattggggccattctgtcctcacaggaggggctgtttgctgacactgggcatgtattttattgtatcagaattaagactctctaaatgccccctaagaaattacttggaaagttggcaaaatgaaaaaaataagagaataataatagctacagaaaaatggaaaacattttccttgcactaaagctaggagcataagacactgagaatctgaaggagactaggtaacaccaaaacagttacagcatcccaaggccatattagtggataagttcttatttcagagacaaaatcgggcacacacttcccattaacacaaaaccaacctcacctcctcactaatgcagagtgggcaattccagatgtccacgtgcttgtgggctgtgggtggctttccttgcatctcagctggcagatggcctattgcggaactttatgatcatgtgatttaatacttaataaactcatatatatatatatcttctatttgttctgtccctctagagaaccctaactaatacagacaccaaaggaaatggtcaagaaaaagaaaacagaaaggggtcgggggtggggagcgtagaattcagacacttccagaggctccacaattgtctctgaggatctctaagaagcctgtctgctctctaggaagtcagcccgctccccgccaaacctgcactctctcccaggttctggtctggctgcataagatcctcaggcaagggtggccccagagggctagtggctctcctgagctcttcccacaggaatccccgctctgcagacaggacacagtgtctttctcatgggtgacatggaattatgagcccaagcatgccagtgacatccctgctcatggagctgtagccctgttgcgggccacagggcactgccccccatgggaccttgagtgggctgggtgctaccttcagagggtctggaggatccagcacagaagcccagccagggatgactgacacctggccctggcccctggctcagaaaccctccaaccatgccaccatccagacaaggccaagtctagaaatgatctcctgattacaactggattatattcctggtttcttctattgttgttaagaacatctgtttaatgtaaaccataatttttgaacctgattttgacattaaaaaaaattggctgggtgcggtggctcacacccgtaatcccagcactttgagaggccgaggcgggcggatcacctgaagtcaggagttcgagaacagcctggccaacatggcgaaaccccatctctattaaaaatacaaaatcagccaggtgtggtggcacatgcctgtaatcccagctacttgggaggctgaggcaggagaatcgcttgaacccaggaggtggaggatgtagtaagttgagattgagccatagcattccagcctgggtgacaagagtgaaactccatctcaaaaaaaaaaaaaaatatatatatataggagaaataacaaaaaaggaagtggcctctttcattaccagaggtgaggcagacacacagagcctttgccttactttgcagccctctgcagcatctggcactgggttcaaggcacactgttggagctcacattggtgtcaggcacacattcaagctagaaatgtccctctggcaaggcttatcttttaataatacaaatccacaatgcaggtggggctgcagggcaggcactctttcccttgtagtcaggggactaagttgggaaggtgtttcctatagcccagcagtatgtatcaaaagctttaaaaagatttgcacccttcaggccagtaattccacattggcaaatctattttaaggcaaaaagcacaaaggcacccaaagatttatgttaatgtggttcctcccatggttatttaaaatagcaaaaattaggaacaccacacatctctagccagtaagggtcaggtaaccaggaaatgatgtgctcatgtgatggagtattacacagccattcaacaatgagttgtacaagttttcgagtttagaactttacagtctaggcagacactaaaaactacagcccttttttccatggtactaggcagcggccacgttcttctttccgttatacttttctgtgctttcctaaatcacagaaaatgagcatgtgttccttttataacaagcaacaaaagtcctgctttatttttaaaaccagaatggcccccaacagctcccttccctgctcatctcttcctggctttcctgtgtcctggtcccctgcagagaaggcctcctgagccatcaaccctggaaggaggctgaggatccctgtctccggaccagcaggcagatggattcctggtgtttggagtcccccaggtgtctcacaaggaacctgtggagagaggggaagaggccaagtgttaaggggctaacaggatggcaaaaaaggcctcccagcacaacacatggggcatcacctgaagcctgtgacacccagtgcacgcagaaaccctgggctgtgattgccaccaacaactgtgtgacaacaagatgtacacaacttcagtgagtctcagactccttctctgcagagagtggatcatcatatccagtagaagatcaacgactaaaatactggaggagttgtatgtaccatgcctactactgtgcctggtacatagctggtgcctgtaaggatagtttactacttgtcatagttatcatcaccatcaccatcgtcatcaccatcactgccaccatcatcatcaccatcaccatcatcactatcatcatcaccattaccatcatcaatcactatcaccatcataatcaccatcatcatcatcaccatcactgccatcatcaccaccaacatcaccatcgccatttctatcaccatcatcaccataaccatttgtatcaccatcatcaccatcaccatcatcatcactatcaccatctccactactatcatcactatcacaatcattattaccatcaccattatcactgtcatcattgccatcatcatcactatcaccatcaccaccatcatcattaccatcacaatcactaccattaccatcatcatcctcaccaccatcatcatttttttctgctgggctggtggaccatgaccctagctttcatttctggcagggagtagctgagaaagcacgaaactccacagaaaacagagaatctgcgtggaaagaatgttgacatctcttctctcttcccaagtgtaccatgtccacacctccaggagcatgagctgagtggaccccagctcagccccttcctgtctttaaagagaggttggaggggctgggcagcctctgtccagctgggctgtgcccccatgtcacccaaagtttcttcttccctagccatgatgccttcatttgcaccttccctgtgcttctcttcagcaggaagggcagccagagggaacagaagctagctgggaccctccatgtctgccccggggacactgctccaggaatctggaaaatgccctgctgctgggagaggaagtgaggtccaccctgtgctgcttaaagagcctgtgctgcttaaacttctcaatttgtcacgaaatccacaaaacaagtgggtgatgaccctgtaagccaatgtcactcactctagagggatgtggccaaggtctgaggtagagggcaagccctgacaccatgtgcctctcccctcagcagccttggggcaggtaactcagtgccttccttcatccagaaaggggacaaggaaccacctactccacaggaacttgtgaggatgaaacagcaagaaagggatgtgtagaggcaaaagcaccaggtccacccagcagccaggaggagagggaccagcccaggagctgacaacccatagagatttctggtctgaaaatgtgggccaggtgcggtggctcttgcctgtaatcttagtgctttgggatgctgaggtgatatccttgttttttgagcctaggagtttgaagccagcctgggtaacacagtaagaccctgtatctataaaaagtacaaaaattagccaagaatggtagcacatgcctgtaatcccagctactcaggaggctgaggcaggaggttcgaggatttcctcgcttaagccttggtgttcgaggctgcagtagctatgattgctctactgcactccagtctgggagatagggtgagaccctgtctcaagggaaaaaaaagaaaaagaaaatcagaacctcaatccccactggcacctactgagtcagaaactgttcctaaggacaagccaggcctgggtgccaccgcagcacagcctgtttcagggcccttggccaaccctaagtaccctgtcactaattacccagggttccccatgacccatcagggctataacttctgttacaggggccacagaatcccatctagaggagcagcccaaatgtgtgactcaagtcccagagctgccttcttgcaggcctctttgcatgcagccatggagtctgtgctgaggtgctggctttgactagcttctccgggaattcacttcttaactgcatttctagaatatatttgctcaaagaaaaccccaagcatgaccgatgggaatcacatatggagcagagccacctgaactgtggaggtaagtcacttatccttcacgagccctggttactcagctctcaggcaaagtgctttgccaggcacatctcaatagccccagacagctaatgctctgtgaccaggaagcctaagggcctggcaccagctgtgcctgcttatagatgaagtggggaagccctggagttcccattggctccatcattccacgggaaagatgcaattaaagtctcccatctgtgagcaaacaagagcatgtcagggctggctatggcatgggcctcagaggagaactggccctcctcacaagcccacagagacactggtgggtgggggacacccctcccagtgccctgcaagagtgtgctgcagtcaacgttgtaggtacaaacatcaaaacaattcaggacaataccataactgcccattattctgaaaaacatcaagacccaaaataaatgcttgcttgcaaatgagtcatacgtacctaagggaaacctccatctacttctgaaatgcacatgaaggatgtagtaagcaatatgaaaattcattttccaaatcacaaaatgaaaatgttatctgtctgactagtgatttaactttaagtaaacagtttatataaaaggccacacaaactgctttttaccatatgagaagctgtgcaacatcacttgtagtaagaaatggaacctacaactgcaataagatttctcacctatccggctggcgaaggtcaaaagtctggggtgtgcctgacatgttcctgctgatatagaccaacaagcattctctcatattcttggcaaaaacacacattagtaaaaacttcttcagtaggagctgttggtattttagacacagaccctgttacatgtcctctccccacagatacgtggatcatgtgtattcactgcagcagcaatagattcaagtcaagataagtgtccattcttgggagactgagaggaatattctggagtgcccacaaggacaaatcctgtatttgctgatctggaacaatttccaagatgtatactgttcagcaaagagcacaagtttgtagaagagtatagagatacatctttttttgtgtgtggaagattgaaggaaatccataaatatgccctgtctgtaatcagaatgttctggaaagacacacaggtccccgattccagtggccatctctggagaggccacactttggtggctgtgctcagcagggatagagggcaggcttctcattggagacaaatttttgactattcagtattttcctatgtatatatattgctacccatcaagaagtgtaaagaatatttttaatcctggcgaggcacagccgctcatgcctgtaatcccagcactttgggaagccgagactggaagatggcttgagtccaggagttcaggaccagcctgggcaaaaatgcaagactccatttcttcaaaaaataaaaataaaaaaacagccaggcatggtagcctatgcctatagtcctagctactctggaggctgaggtgggagggttacttgagctcaggagttcaaagctacattaagctatgaccacaacagtgcactccatcctgagtgagagagcaagaccctctattaaaaaataaaagggatatttttaccttttacctcctttgctaagtataatcttaagtttaatccagaaagaccctctgccacagagaaagcagaggtctagagaacagcatgaagacaataagagacttgagactcacttctcctttgtcttcaggccacagaaagccaaaagcatctgaacatcttcttggaggcattttcctaaaagagagctattgaaacttgaagaaaaatgtgaatcgagaaactaaatttaaagatacattattttctccaacccttcctcacaaattaaccacagaatgagtctagtgagataaaacataccatttacacaaaatacggaagtgatatggtctttatgtgagcagaaatatgttcaaattttactccttaaatgtattttcttttactactagaaatagtaattttcacttgatcattactttattttataattatctcaatttaaatttgtgttagcctgctcctgggtatctacctaaagggaaagaagtcatatgaaaaagatgcttgtacacacatttatagcagcacaatttgcggttgtaaaaatatggaaccaggttaagtgtctatcagccaatgagtggacaaagaaaatgtggtatgtatacagcatggaatactactgagccctaaaaaggaaccaaataatggcatttgcagcaacctagatggagttagagatgattattctaagtgaagtaactcaggaatacaaaaaaacaaatattgtgcattctcgcttataagtgggagctaagctatgaggctgtaaagcataagaatgatataatggactttggggacttggagggaaggttgtgggggtgaggaataaaagactacacattgggtacagtgtacatgactcgagtaatgggtaaaccaaaatctcagaaattaccactaaataacttttccatgtaaccagaaaccacctgtttcccaaaaactattgaaataaggtaatatatatgaaaacaatgatagtcttgaggtgcaatattcactaggttttatatgggagaaaaacagagctaaaatcaaacacatggacaggcagtcagaacaatgtccatcatatgcaaagtcaaattaatatgagggcaaacattcatgagtggagtccatttggaatagactgcagtgaggatgtatgccttagggccctcataactcatgttagggagaaaacatataattttactcaaagtgaaaacatctttgcaaataactcaatccacactgcgcagatgcagtcctgtactgtagagagtaagaataagaatcatcaaagtggaaaaacctctgcccctgctccaaactctacttcacacaggagtagtactactggagagaaaagccatacatgtcccaaatgtgggaaagcctttacttatcagtcatttctcatgagacatatgaaaattcacactggaaagaaaccttacgaatataactaaagtgggaaagcctttagatattccctacaccttaataaacatttaagaaagaacattatggagaagccttttgaatttaaggaatgtgggaaagacttcagcgagcctcaagacatgcacatataaggagtcgtgctggaaagaaatcctataaatgtgacagatgtggaaaagactttgcaaagtcattggaattaaaagctatcatcttaagagatacaatagtgagaagccctgtgaatgaaaggtgggaaaatcatcattaattttttcaccatactgaacatgtaaggaggacatactggaagggagctcaacgagttaacattcatgagaacacctttctggaactctcatatcttacagaagtgtgaaaagaaaccctgtgaaagtaaagtctatggaaagcctttcatattcattcaccttgagtagatatttgttctcacactggagcaaaactatgaaagtaaggaatatgataaaaaaaagactcattattacctcagactcatagttcatacaagaagtcacactgcagagacttcttctggaagtaaaaaatgaagaaaagacctctttaaacacgtatccctcctgttacacatgattccacaccctggagggagactacaattggaataaataaagaaagctttcagttccaactcctcacttattgggcattaatgagcacagtataggactgaagcactgtaaatgtgaacaattgctgccatgccattatcattgtcttatccctcaattagaactcagattcagaaaatctgtttggaaatgggacagttattgttcctcttttctcttaaccaagttccccttgctctctatgcttgctgctctctggaaataggatgaaatgccctgagtcgggtttagcaccttgaagaccattggactgaaggtcccaataacaaaaccttcaaattacaaaatttctcacttcccaatggcatgttgggtatccatggctgccctggactatttctggacttacttcatgcaattaaccccttgtagaattaagaaacattttaggagagatgtttataagagattaaatgataaacctaaaaaatgaataaaacatactataaaaataaagagaacaaaccaaatgggcttgcagattctgactggccacattcatccttgatgcttgtccccatggatgcctcacctactgtgacacttggagggcttgcagccatcactcaaggaatcagaacacattggcctctactgcagcatcagggaacaaagcaaaaacagcctctcagctctcaagagacacacttatgtgtataaacatatgttatataaatttatccagtgactttgagatgtcttacactaaatggataaaattaattaaaactagcgcaaatttctggcaacagcactccaactccccattgtttatccagggcattgaaaattggcacacatcacagatccttaagtcattctctgaatcagcaggagaaaagaggagaacagagggagctcactgtatgtgccaggcactgggctgacagctgtgcctacatcatcccacttgatgcttgccgtaaccctgcaagataaaagtaaagtaaaaacacacacacacaaactcacacatatacgcacatgctcaagcacacactagaaactacagaacaaagaaagcattggcaactaatagaagtatagtgctggccaagcacagtggctcatgcctataatctcaccactttaggccaggagttcaagacaagcctgggcaacatagcaagacaccatctctacaacacattttctaagatagaaattatttttagaaagatataatgcctaagggctcagggaagcaatacctttatgactgtatggtaagcatcaggcaaggctgcttatcagaccaaagtggtagtgattccagggttcttttgcacacttagctaggaacctggttcactttaccctttctacagctctaaagctctggcaggtgggacctaagcataagagaaagtgatattatgcagaactctcttgacttcaagtgagtccttgactcacttaacctaacccgatccagcagaacattgaattatttgtctatcacaactaaaaatatccaggagtagatggcttctggctcagtgggatcaggggtcagctaatttcaaccaagactcattccgtcccttcatttcctgggccagctctgcttttcagagaggctattttgagagagcagcaaaaatggccccatatatttcttatcacttacttccttgcaagtagctattccaataaaaagaaagcaccctattcaaggccgtttcatcaaaagtgcagggatggcttccatgagcccagcttggatcacatgcccatccctgaatgaattaccctgctgatctgattgccgagggtaggtcagcccttcccaaagcacatggactagaaatggaatagtggtcctcccatgaaaaaaaaaaaaaaaaaaaagaaagaaagacagcatagtgggaaaggaatatggatgggatggtctcatctctatataaaaagtatgaccgtattggtggtcttttgcacactcatttatatagtcactgggaaaaaaattgagaaaaactcacacatgagtttctatatgcctctgtgctttgttttcaacaccaagctgtgataaatttaattattaaaacaaaactttgaaaagaaataacaatttggacaatggggacacttagctgatgcagcacaggtgagcagttcttcttttgtgcccaggaagacacaattcccaggagcccacctgtggtctcctaagacaagcatgcagactgcccacaggctgcagttccacctttcctttcctggactcttaggaataaacaagttctgaattcagctgacctgagttcaaattcaggctctctgactcactgggtaagtctcttgctctccttgagtcccatatcctccttggaaaaatggaggggtagagttgttacgttttgaaggcaaggcgagggttaaagaaagacagagagagacagttggcggcttcaacagcaacacttttattgccaacaaaaccctgaggaggggtgaaccagcttagtgccagcgccaactgccgctcacaggctgaggtaatcatgggatgggagggaggggtctgggtggtagagcttgctgcccagcaggaaacggcaaggatgtccctgcagtcaggctgttggacctttgcctgggaggatgcgataaggatgttcctgcagtcatgtggttaggaaggatgtttctcacagcccgagttcccatggaatgtttcactgtgaccagggtctgcaaaatggctgggggtttacaaaatggtacaggttaggctaacagtaacatctcccaggtaaacagttcttcaaagtaaacttccccttagcatttacactgtagtagtagacatggtgccaggacccaggccacaggacgaacaggacagatgaggcccctgccatcctagtgttcatgtctgatgaaggaagctaacaggtcataagaccaaatcagatggtggtggtaatcaaagacattaccagagtgagaagaactagaaacaaactgaggaagctgttccaaacacagtgaaagggagagacccctcgaagaggtgacttttgagcagaaacctgaaagatgtggaggaggcaatggagaaggaccagcccctggagccatcccagcagtaaagacccagcaccaggtgggcaattgaatgtcctgacctgtgtgtccttcatgcttccttcctcagtggtgcacaaagggaaacatggggtaatttcacgcagggtccatggaggaatcaagaagcagctgcgctgcagagctggggtggggatgaaatctggcccaacagtgaagctagaagcaggtgcatgaagcataaccagcccctgaagtcacatccatggccagaccagctggccgggctgccaacatcttagtagagatccctggaaatcagatgagctggttaggggggtaataaaaaagctggaaagcttcagaaaattccagaggacacatgacacttagcatgaactttccccgagtgggatctgtttggcattgctggttctaaagagtcggtaccaccactcccacctgcccattaccccaccagggaaacactcagggtacagtccacagaaacaatccctgtggaattgaaaagggtgtttctcatcccaaaccaagggaggggacccagaaaaccactcataaagagcagaggggcctgctgggagagacagggttctgctgctcatttgggtatctgcttcccagcgggaaaggggaccatgcaggatagagcggctaaggggaacctgggctgtcgggccaggagagccggtgctgactcactgttggaggtgagccacaataggaggcttagaaaccctcccggcagcctctccagtctaataaggggatggtagtgttggtcagtaggggcatccagacgcagtcaaagggcaagagagtgatgtctcctctggcgtcccctttcagctgcagattctccctatgagttcctgagaaagcttctctatggctccacaagactggggggtggtgacagttcccagatgaccctaaccccagggccttgtgccatccctcctcgttccccctgatcctgcccacgccgttgtaaacagctccttcttaatggcccgtcagctgatgagagtttcctgccagcacctgactgccacactgctttgccaaagggaccaggctcctcggcacaggagctgaggttctacaggcacagagaaaacactgtctgaacgttggaatggagtcgggagcggaaaaaagaatgtttgttctcaatgcttacacttaccaattgtttccttttatcacatgaagactgtgtgtcattttgaagtagaattagtaatctacataattacaaattatgttcttaaaataaactgctcagtgccatgcttgacacaaggtggaactccattatgagatgtgtgagaaaccagggtgccatggttacagacaaggacactaggtgcagactgcttgcttcaaacctggacaagcagaacgaatttcggcaactctcttgtattgctctttgccccagtttttttcacctaaaaactaaaagtaaaaacaaggttattgtgaaaattaaatgaattaaagtaagcaaagtacctacaacaacaccccgaggcacagtcagccctgagcatgtttttcattattactcttaatgaggtaagaatgagaacacaggcaccaaccatgagcctctggcacaggcatcagagaccaaatttttaacagcctccattcattcatttgaccctgataagagagaagtctcatgccagaggagcaagcatccaccttgggaccagacagcctatggtcaaagttgaactccaccactgttcagctgtgtgactttgggcaagtgactttccctctctgatcctcagcacaatcacaggtctatgaggattgtaggagctgactgaaaaatgtgtgtcttagtttgagtttcctggaagtagatccagaggaaaagattcagatacaaaaattttgtttggagatgactctcggacagtaattctactgccagttcttccttagggtggtaatcccaggaaacaccagaagaggagtggggaactgagacaggaaaggaatgcagcagttaaagggaccttcatcaggaaagtttccactgtggcagccaagactcagccctgccaggtacttctgagagacagcacagaacatgtatctcagagtcatcccaccaaaagcaagggagctgggatatttatccaccaatacccaccagtcactcctcagggctccttccaaagacatgattcctcctgaacgccctgcctgcactgcaagggttagaccttgggttgagggcaggggagctgacaacacctccagcaatgagcaggaacacaggctggtgtggactgtttcagtcactcagtgactccaacacacacacacacacaccccacactccaacaccaatacagggcatatgtacatacacatacatgcatacatgactgttacctgcttcaatcctggtgaatccatgggatcgatgataaggtgggaatcagagggaagagcaaaataaaggggagtgaaggtcttaggaacaaaatgcaaatataggcagaaaatcaagggggaagaggagtggtctggacaccaaatgctggctgggtgccacctgctctacattcactgtcaggcattccccaagcagctttgtgaggtagaagaaattcccctcaatttacaggtggcagaaatgtagttcagaaaagaaaactgattttattaatgtcttacagagttagtgggtgatagatatgtttctgtccacaaagcctacaaattttcctcattatgcaggctgggtaccaggccttgcttctgggctctgctacttttcctgctaggcaatcatggcagaattgacaaaaacattttcccccttcaccacctggagcagagccaatgagaagggctggagaacaggccatgaggccctgcactcaccattcaatgtcttcaggactgtggtccctcaggactcttgcaccatgttctagcagcactcctggtgtctgggggtcttgtgaggttgtacaggatccagtagaggccactggctgtgctgtcatattctaaaggtggccaggcaggtttgtgtctcttggctgcttcagtaccagaggatggagagtgccaacgcagtgaggccctcggtagaatgggaggagggaaggaaagggcagaatggagtgatgtagggtccatccaccatgtccctggatggagagacccctgttctcatagtagccccacaccaggaccaccactggcattcatgaacaggccagcctccatttacacgtcctcatctgacaactccttcccattttcatcctggagacaagacctctgaacacactagctctgagggcacctgattgtaacctgagacagtctctggagactgttcatccaagcaggatccctcccttgccatctccagacctcccccacaagctccctccctggtctgctcttgttcactcattccagtcagccttctacagtcatctctaacacgtatctgactggcccctcctttatccagcaccttccatggctccccaaagcactccagatcaagttcaagttctttgatcggacagttgatctcaagctgcattctacctcctgaattaagatcccggagaagcccacttgctcaggatgatggtgtctgaagttgtgcaccaagtcacaggccttgtagaagcatcacccctcaggaatgggtacactggcggcaatatagtcactggattcctgcagggtgaggctggggagaggaagtagctccataacacatatgaaaccctggaaacccttcccagcaaaaatctcaggaccacgttacatgcagaaatgggtgccctctgagcacacttctctctgcctcccactctgagctccctccaggccccacatgccccatcctggaccagggcttggagccagcaggtgttcagtccatggtattgactgcttcctgggccaggagagcccttggtggctctgtgactcctcctgtggaacccctgactctgccttgggacctcccaattcccgtgggaagcccccatggctatggattgccacacctgccctgggatcctccaaccccataagacttacttaatgccttagccctcctagaatatgacgtgtttctcagaaggtgacttatctccagggccatctctggatgtttgctggggacctcttactgttctcctttctgatctgcagggcagggcccagaggagaaagcagcccaaccgcagaatgaacaaagggctcactgccacaaacaacaagcaccagtcagcagtgcttctggaaggaaaggaggtttcattctgcagaaagctccttgtttggcttctttctgaagccaggaaggggtactaagcccagcttacctgtggtgcctacgttaccatctgtgcctaggatgtgcaatgggcccttgctcccactgcagggttgacgttccctccagctggagacctggtctcctgacatcgcctggcctgtttgtcctgctctggatgagcgtggaaagtctgtacctggtattttcctaggtccttggtttacaccttctagatatccagcaggattgaccttgcccagccccatacctgaaaggggtctcccttgaggagcagccgaggaccgggactcccctcccacgattcaaagagtggatgagtgctcagcgtcgggaaatctgatctagacctattttttcatttaggtcaccaagagacaacccctaacccctgagctagggatggtgccagctctggcatgagattctcttccagcaatgtgatgcttgcagggacaggccgaaacctggtgaccaggtctgctgtcctctgggtaaggacagtgtgctactcaacctcagagagacaggtggtgccaggacacagcactgggtgcctgtacccctggctctgcagatatcagtcatggagttcctgccctctccacattaccttcttgctgctcctagatttcttctagtcattaagcacttccagtcatttttctgtgcatccaatctgacatttttgttgtcagatgaaacacaataaagtaagctgagccaccaggattcctggaggggaccttggatgctgggtcttgggctccagggccctgatgggactgaatcagaagtagccagggaaggataaacactggggctgagcccctatgacacaatggccattgttggcctggccttatggccccaagacacactgtcctcaggccacaggcaccatgggttttggtcaggtcccagcctcccaatagtgtcctggcactagcaggtgctgacccctgagccacaaccacagttctgggtttgggatttagtaaaaccacctcaggggcagagttctggggctgggtttggcaggaactatggtgactcccagggatggtgtgtcacttctacttgccaccaaatgtgcacataggctgtcccccaagaccagctcatcctactggacagaatggaggaagtcagggaacaggcagagtggacagctggggtgcaggcagaggcaggtgcatgctgggaggtcaggccctgtgagggctgcggggatgtcaggtggagtggattccaggtgcaccctcagtgcactcagcaggtctcagtccaggccctctggaccatggctgggtgatgtggtcactccctggggtactactgtcagaccctggccacccaccctgggaagcaccgtcccatcccaggactggactttctgagtcctgagacaggacagtgctgtccaggcctgacagactgggagaacctgccaagtcctccatccctagaacagcctcccacacagcaaggacaatctcttaccttcaccttcagggcactaactgatccttctcactctgaggcaacaaaggcagagctgaggacctgcaccaggctgggagccagtcccctccctaagtgggcctgagggaagcaccatccctgtcccaatccgccactagtttccacccaggagacacatagggaagggaggagggggcctaccagctggctgatactggaaaagtgggacctgggagaagagggagtgcagggctggcaggggatgctccaggcccatggagagctcgggctgcaccatggtgctgcccctcctgggctggaggctgtgccctctgcaggaactgagaaagtccaatcctgagatgggacaacactgcccagggtggttggccagggcctgacagtagtcccccagggagtgaccacatcacctggctggggtccagggagcctggggtgagacctacccagtgcactgagagtgcacctggagcccacctcacctgatgcccccacagccctaacagggtctgacctcccagcatgcacctgcctctccctgaaccccaactgcccaccctgcctgttacctggcctcctccatcctgtgcagcccatagactgtgaccatctctccagccactctggcccttcctttaccgttgtcctctcagaatctctgagcaggatctcccaggtccatccaaacacatgctttgtccacttttgactgggcccttgggtaccactgggctaccccagctgtccacagggccttcaataatgcacattgcacctggcttatccaagcagtgctcagtagcccacattgaccaggtccctgctgaccagaccctgcaaatcaggtcctccctgatgacaccctcactgattagaccctcatgaccagaccccactaacaaggcccccactgccaggcacacaatgacaaggactccactgaccaggaccttactgacaaggcctcactgacaaggcctcaaggaccaagtccttactgacaagtcctcactgactaggtcattattgacaaggcctcactgatcaggttccactgatcatgacctcattccctggccccaaagatgaggccccactgaccaggcctccagggaacaggttgccactgatcaggccgctactaaccaggcctaaggtcaccagatgcccctgactgggaccctagtgagtagaccccactgaacaggcatgtaatgctcagatccctgctgaccaggtcaccctgtagaccagtgctacaaaagtcaccactgacaaagtcctctctgaccaggaccctactgattaggtcctactgacaaggctgccctgaccagggacccaccgacaagggcctcactgatgaggacacgcccaccaggctctgctgactgggtcccatgtgcccagtcctccactgaatagcaccccttgacctgtcaccagtgccccagcccatgctgaccaggccagcactaagtcccagatgaccaggtctccactgatcaagccccacagcccaggtttgcactgaccagacaccaaacatctggcagccaataggtccccactcaccaaaacccctaaaacttgatcccactaataagaccctctctaagcagacccctgctgaccacgatcccactaaataggcctcactgacctaccactgaccaggcccacaatgatcaggctcctcctaaccacaccggaaatccaagcggcaatgatatgtttcatatggcagaagttggagcaagacagagagacgaaagaggttccacagccttttaaactactagatctcatgagaactcactcactatcaggaggatggcattaaggtcttggtgctttaccatttgtgaaggatctactcccacccctttatgattaaagctttctccacctaggccccgactctaacattagggagtgtattttcacatgagttttggaaggggcatagagaaaaaccgtattattctgtccctgacaccacaaatctcatgtccttctcacattgcaaaatacagtcatgccttgccagcagtctcccaaagtcttaactcgtttcagcattaactcaaagttacaaagtacaaagtctcatctgggtcaaggctacattctctttttcctacgagtctctgaaataaaaagcaagttcactgcgtctaaagtaaaatgatggtacaggcattgtgtaagctttccatatccaaaaggaagacattttccagaaatcttcttatttttatctaggccccctcagcctggccttcactgtccatgtttctgtcaacattcttgtcacaaccatttaaccagtctctaagatggcccaaaaatgttctcatctgtctgtcttcttttgagccttccaaactcttccaaccgctaaccattacccagttccgaagccgcttccacatttttaggtatctttatagcaaagctccagtcctcatttgccatttttggtatgatttattttgaaaaagaggtttaattggctcatggttctgcagggtggacaggaagcacagtgcttctgcttctggggggtctcagaaatctttcaatcattgcacaatgcaatgaaagagcaaattgtctcacaatgcaagaggaaatcacggagagtagggagtgatatagagtttttagtggccagatctcacgaggtcactcatgattgtgatgaggacagtaccaaggggatggtgctgaaccattcatgagaagtttgccttcatgattcaatcaccttataccaggatccacctccaacattaggaaatataacacaacatgagatgtggtggggacacatattcaaattgcatcatcagtctttgagtataaagacatccacagcaggctttatccagccagcttctttgagactttttataggacttgaggtctatagcatatccactaaaatattcctacttcaaaaggcaataaagtaagtggtattatcattcttcaaaaagttaccatggtagtgtaggcattcatagtatgacttagttcatttgctgctgtttctattctatcaccatattaacactatcctacacaattctatattcagctgggtttcacttgagcacaaaatcatccttgtactaccaccgatagctggcactagctctttgatactgttatcattctgctgtagaaagtacctgtgaactggaaaaagttcacaatcgaataactagttattcaacactatcaaattttaggtgactttttgaaaaaatagtatctcttgttgcaagaaatgctccatctgtgatttcaagtctctcacttgagtgaattggatggaagtggtgaatttcagccaaagtggccaaagaaatcctgttcctgtgataatgacaccatcagcctctgtacctctgtcttcccttctgccacatgttgcctgttgtccgtgactttggtaagagcttccttgtgtacgaggatgatgtccaggatgttggtctggtgtccctgagacagcactaacaggtccatgcctgggtccaggtccttcctggactgattggcaaagagctcactgatgttcttgaaggcatctctgcttaagtggatggcctagtcaagctccaaggcctggctgaggctgaagaaaaactggccgccttctgaagctctttctaaaagcctgtcactgtcatctgcttgcatgtcaactcattggctgtgaggttgagctgagtggcctgtgtccatcttcttggggaagcatttgaagccatcaatcttgctctcccacccctaaaggttgatggtccccacctgggggtgtgctgagggtcagaaagaagccagcactcaccatctcatccttctcagccttcctcttgcactctctccaggctgtctcttcagtgctggtgggatacatcagaaagtgatggaagatgtggcactgtgcccacacccagaagctggccatgtggttggctcatccaccagaatggacgctctggttgctctttgagccagcttggccttgactggcatgcacaggccccaggtatagatacgttgctctgagtgaacttctcctgccttgggccaaattctgtcaggccagtcccacgggtggtaatcctggctgttttctgcacttcaacataaagacctcctgaagatggcctgtggtctgcctctttgcaaccaagaagcccgcagtgccatatgagccctgaggcatggactggagcccctgaggcagcacacaccctgctcctgagcctgctgctcaatttctctgtgtggctccatttgtgtcacagttgttgcactgacttgtgcatgccggggaaggccaagctggctcaaaaagcaaccgaccacctctgcaagggtgtgcctggagctggtggaccagccaccaacctgacttgctgccggtcggggtacatcagttcttctaccctacaggtagggccacagtgttatctgcttttcctcaggcctctgctccatcagccatcaggaggcagcccctcaggctataggaatctggccatccctgcttccttgagtgggtgaggttggtggctgctccacctgctccaggcacacccttgcagaggtggctgattcctctttgagccagcttggccttgcctggcatgcacaggccccagctacctatatgctgttccaagtcagcttgtactgtgttgggccaaattctacctctggccagggccacagaaggccgagtcccctgggtgctaatcctggctgctttctgcacttgaacataaagtcttcctcaagaccgcctgtggtctgcctcttggcgaccaagaagcctacagtgccatacaagccctgaggcatgaactggagccacaaaggcagtgcacgccccattcctgagcctgctgatcatttcctctttatggctccatttgtagtacacttgttgcagtgaggcttgtgcatggcaggcaaggccaagctggctcaaagagcaaccagccacctctgcaagaatgtgccaggagcagatggaccagatgccaacctcactcactgtcaggagtggtacatcagttcttctaccctaaaggtggggccgagaggcagaccacaggccgtcttgaggaggactttatgttcaagtgcagaaagtaggcaggattaccacccaggggactcagccttctgtggcccacagtgccatatgaaccccgaggcatggaccggtgccatctgctttatacaaaaattaacttaagatagattaaagagttaaacatgccacctgcttttcctcaggcctctgctccatcagccatcaggaggcagccactcaggctgtggaaacctggccatcctggcttccttcagtgggtgaggttggtggcttgtccacctgatccaggcacacccttgcagaggtggctgattcctctttaagccagcttggccttgcctctcatgcacaggccccacctactgacacactgctctgagtgagcttgtcctgccttgggccaaattctctcaggccagggccacagaaggccgagtcccctgggtgctaatcctggctgctttctgcacttgaacataaagtcttcctcaagacggcctgtggtctgcctcttggcaaccaagaagcctgcagtgccataggagccctgaggcatggactggaaccccaaaggcagtgcacaccctgctcctgaccctcctgctcctttcctatatatggctccatttgtagaacggttgtttcaccgaggcttgtgcattccaggcaaggccaagctggctcaaagagcaaccagccacccctgcaggggtgtgccaggagcaggtgggccagtcaccaacctcacatgctgccagtcagggtacatcagttcttctgccctagagttagggccacagtgccatctgcttttcctcaggactctgctccatcagtcataaggtggcagccactcatgctgttggaacctggccatctgggcttccttgagtgggtgaggttggtggctcctccaccttctccaggcacacccttgcagaggtggctggttgctctttgagccagcttggccttgactggcatgcacaggccccaggtactgacacgttgctctgagtgagcttgtcctgccttggaccaaactctgtcaggccagggtcacaaaaggccgagtcccacgggtggtaatcctggctgctttctgcacataaagacctcctgaagatggcctgtggtctgcctctttgcaaccaagaagcccgcagtgccatatgagccctgaggtatggactggagcccccaaggcagcgcacaccctgctcctgagcctgctgctcattttctctgtgtggctccatttgtgtcacagttgttgcactgacttgtgcatgccgggcaaagccaagctggctcaaaaagcaaccagctgcgtttgcaagggagtgcctggagtgactggactagccatcaacttcgcccactcaaggaagcagggaatgcgtgtttgtaccatgcatttcactacaggtgcatttcccctgaggttggtggcctaggtttcttctagatttttttatggttttaggtcttacgtttaactctttcatccatgttacttaatttttgtttaaggtgtatgggtgtggcccagtttcagttttctgcataaggctagccagttttcccaagatcatttattaaatagggtatcctttacccattgtttgtttttgtcaggtttgtcaaagatcagatggttttagatgtgtggtgtcatttctgaggcctctgttctgttccactggtctatagatctgatttagtaccagccccgtgctgttttgattactgtagccttgtagaataatttgaagtcaggtactgtgatgcctctagctttgttgtttttgcttaggattgtcttggctatgtgggctcttttttggttccatatgaaatttaaagtagtttttctaattctatgaagaaagtcaatggtagcttgatgaggatagcaatgaatctgtaaattactttgggtggtatagcactcaggcacaggaatctccttgtgttaggcaatatcattcaggacagagccatgggcagagacttcatcactagaacacaaaaagcaatggcaacaaaagccaaaattgacaaatgggatctaactaaactaaacagtatctgcagtgcaaaagaaactattatcagagtgaacaggcaacccacagaatgggagaaaattgttgcaatctatccatctgacaaagggctaatatgcagaatctacaaagaacaaatttacaagaaaaaaaacaaccccatcaaaaagtggacaaaggatatgaatagacacttaccaaagaagacatttatacagccaatgaacatgtgaagcaaagcacatcatcactggtcattagagaaatggaaatcaaaaccacagtgagatacaatctcacaccacttagaaaggccattgttaaaaaatcaggaaacaacagatgctggacagggtgtggagaaataggaacacttttacacagtttgtgggaatataaattagttcaaccattgtggaagacagtgtgacaattcgtcaaggatctacagctagaaatatcatttgacccagcaatcccattactgggtatatacacccaaaattataaatcattctaatataaagacacatgcacctgtctgtttatggcggcactgttcacaacaccaaagacttggaaccaaccaaaatgcccaccaatgatagactgaataaagaaaatgtggcatatatacaccatggaatactatgcagccataaacaaggatgaattcacgtcctttgctgggacatgaatgaagctggaaagcatcattctcagcaaactaacacaagaacagaaaaccaaacaccacatgttctcattcataactgggagtagaacaatgggaacacatggactcaggaaggggaacaccacacaccagggcctgtcagggtggggggctaggagagggacggcattaggagaaataactaatgtagatcatgggttgatggatgcagcaagccaccatggcatgtgtatacctatgtaacaaacctgcatgtctgcacatgtaccccagaacttaaagtataattaaaaaaaaagaaatttgcttttaattaagcttttaatcatagaacttgtaaagaaaatcctttcgaatcttttactaccacatcatagctgggacaaactgctgacgttctaaaagtaacacaaatatcaaacagaaagaactagacttaggaatcaaactcaggttactgtagtgaacagggcagaatcttcacattaggtcaccaccagtactccttcactttggccttggctagcaaaagaatggcctttttatgtagatgagaccacttacgtaaaaaaaaagttttaaaaaataatttctgctaactggaatgttttttgttgttgtttatttgtttgtttttttgcagccataggagttttagccaattcagaggccttgctccccacaatttggaacattcctttgaatttgaccaagtcaggaagagatgggagaaaagtgaaacaacaataataaaaccccaagcataaacaaacaaaaagagttaagcaaaacaacaaatgcacaattcatatgattactgagtgttctaatggtaaggagaaattaaaagcagaaattaaaagcagctggtgagtaatcttaaattttagtcattaaggaaaaattttaagacaaaactctaattcagctacttacctggaaataaggctcaggctggtgatcgttctctgccatattagaagctggaaaaaacttacactcaccttccctgtcagaagcaagctgaaactcaggaaaggaggtgcctgctctccatcatcgtggaagcaggaaaacttgccttccttgttggaaatgagtaaaacttcagaaaaggagttgtacagcaaaatcaaacttagatctcaactagattttgggagatcagggaccctctgcaggggagaaactccacaacctcagcaaattatcctgttgatttgggcaataaagatagcccaggttggtatcaagcaataatgagatttatcaaaggtcagggacatctttgtaatgtccttctctgtcttttttaatctttattggtatatacgttttgtcaaaactaggagggcaacacctgcttttttctgttttccatttgcttgaaagatttttctccattcctttattttgagcctatgtatggcactgcatgtgagatgggtttcttggagatggcatactcaaattggtcttggttctttatccagcttgcccccctgtgtctttcaatcggagcatttagcccatttccatttaaggttagtaatggtatgtgtggattggatcttgtcgtcatgctgtcagctggttattttgcagacttgtgtatgtggttggtttttagcatcactgttctgtgtacttcggtgcatttttgtagtggctggtgatggtcttttctttccatatttagtgcttcattcaggagctcttgtaaggtagatctggtgataatgaattctctcagcatttgcttgtctggaaaggatcttgtttctccttcacttatgatgcttaattttgctggacatgaagttctgggttgaaatttcttgtcttttttttttaaccatttaactctctagctctcattttaaccattttaactctctagctgcctttaacattgtttctctcattttgaccttggagaatctgatgattatatgttttggggatgatcttttcatggcatatcttactgcggtcctctggatttcctaaatttgaatgttggcctgtctggctaggttggggacattctcatgaaagatattctgaagtacgttttccaagctggttccattctcctcatctctttcagatacattaatcagtcataggtttggtcgtttatataatcccatatttcttggatgctttgttcattccttttccttcttttttcccccattcttgtctgcctgttttatttcagaaagccagttttcaagctctgggattctttcctctgtttggtctattctgctgggtggtcttgcacatgagatggagctggtctgacctcagccctccttagtctgcttgcctctcccaggaccccagcctggccacacctgcttacagggcaatctcgggtgcccacacacactacaataattttcataatgcaatcacacataatcaccatgtgactccattatgaaaattcttatagtgtgcttttcagctctattaggtcggttacgtcttctttatacttgctattttgtctgttagctcctgcaatgttttaaaatgatttttagctcgcttgtattgcatgacaacatacttctttcactcagtgaactttgttcctacgcatatcctgaacactgcttgtatcattccagacatctcagcctcagcccagttcagaacacttgctggagagttgatgcagtcatttggaggaaggaaggcatgctactttttgagttttcagtgttctcacacagattctttctcatctttatgggcttatccaccttccatctttgaggttgctgacctttggacagggtatttttcttttattgtatttgatgatcttgagggtttcattgcggtataaggtggattcaaccaactggctttgtttttggaggattttgggggggccaatgtgcagctcccaattcctggactgtttgctttaactctggggaacttgtcttgggccccaactttgttctctggctcctcgaggtttggagtccactgctctgtggggaccgaagtgtagcaactgtgacggaatgctagtggatgcaaaattccctgcctccctgcgggtgttcacccagtggtggagacaagacagctggggtgtgggccagggctcccctgctgtgtgtgtgttgtactggaggtaatgttcgttcagagtgagctgctggccagtgcagaccatggtgccttctctgtgcccctcaaagcaacagtggtcgctcagggtataagaaggtccctttttctctgcacagcattagctcaacggtgaggtgctggcaggggtggggttcttggttctgtgcccaccaaggctctgtcttcaatggcagttggtgtgggttggtgtgtgtgctgcactcccatgtgctctcagggcaagtacagcaaaacccacctgtgtaaacacacacagcaaagtgatgtaggaagtttccatataaagggctgcagtatggagaggtaatctgcagactggtgtgtggctgttggggccaccttgctgcagctctccactgatcaggtatggtccactagcacggaagctatgctgtgggcatccgaaagtgccctgtaagcaggtgtggccaggctggggtcctgggagaggcaagcagactaaggagtgctgagatcagaccagccccatctcatgggcaagactgcccagcagagatcaggtctcagaggagaactctctcaaaagtgaacccccagcacagcatagctgctttacacaaacatgggcaggcttcttttttaagcaagtccccttttttaagagaggaactctgggacctgatctctgctgggcaatcttgaacatgagatggggctgatctgagcttagcattcctaaagtgctgggatgaagtgtctcacaagggcaagtggaacctagagagatagctgtccctgtcctctgggctccacatcacctgacttgctgctccaccactctgcttttctcctgggtgctccatcccagagagatgtgagttagcgtaatcagcccaggatggagggtctgtgttgtgagcccaagccagggttccctctctggtgatgagcagtgtggggtgtgtggtacccgtgggagatggactggcttgttcgttgggtcaactgcagcttattggaggtgtcgatatggcacttagggtctttgctcccttgatattctgagggtagcaagggcagttccactgcagagacagtggcagagagaatttcatttgctcctggaagctctgtccagggaattgctgagttgctactggcttgatagctccaatggtggactggctggagacccaggccaggaggacctgctcatcaagtagactgtctggccacttttctgtcaggctgctggtatgctgggtatcccctccagtccctatttgccttgtattttccagggaagatgatagcctgccccttcctctgggagctctgggccactgaggtacgaacttgttgccgatatgaacacacctataagatgtgactggagacaagttgagaagtcttatctagtcaggaggaacaagaacagggacttgcttaaaaaaaaagtctggccacgtttttctagagcagctgtgctatgctgggggttcacttccactcctggtcgcctcagacactctgaagccctaaggctgaaatggctgagttgccccaacagcaaagatgacagtctggtcctccccctgggagctctgactcagggaggcctgaaacctctgtcagccagagaacagcagtgaatgtagctggagaccttggttgaaaggcttcacccactgattagaaatgtggtcggggactgacttaaacaagagtctggccacgtttttgtagtgtggctgtgctgtgctgtgctgagtttcctcttccaccccttttcaccttgggctttccaaagcccgcaggccagaacggctagtcacccaaacagcaaaggtggtggcctgcccctctctctgggagctctgtcccaggaacacttcaaatttccattggccaaggaatgctggtggcggtagctggaggccccagttgggaggtcctgtcctgtgacgtggaacagggtcaggggcctgcttacagaagcagtctggccatgatttggtaaagcagctatgctgtgctgtgggatctcttctgccactggtcggtttgtcctctccaaagccctcaggctggaatgactaagttgcctgaacaggaaagatggaggcctgccccatctattctctcagagttcatcttgtttgatggagcttaatttttagcctgttaattttactgtctacattagacttgttcggaaagaatctgttatattttaggttagatatatgagaattcattgttttctgtaaataaacctgttcatgtcttgttctctggaaagaaatctctttcaactatctgactttggtcacaatcatgtagagcagtagccagtctacagtgacataattgaatttccatttccagtgtttcgtttttgtgtcttacattttacagttcagaattgcgcattttattcccaattgtcaaaatgctaagctgtccactgtactgaaatagtttttgttaattcttcgtcattcaattttttttaagatgtgcacttttatccaacttttctcaagtcagagtacagataagccctggctgcctccagccgctctcagggagaccaaaacccttcatacactccaagttggggtacaaaaaaggggggccatgaaggctaatcattaaaaataaaacaaaagttaaaagtattaatgcaaagatttaaaaatttttgcattatgtaatttacacaaaagcaatgctatcacctcccctgtgtgaactcgggagaggactgggccattctccttagagagaagtagggtggcttttaggagggcaaggggcttcctgaaacaatacatctcacaatatttggaatgactattgaaaagaagaacaatgtacaatcaaagtccttggcgacattgtagaaccagcgggcgctgacccctgaaccacaaccacagttctgggtttgggatttggtaaaaccaccccagggacagagttctggggccgggttttggaggaagcaaggcgcctcccagggatgatgtgtcactcctgcttgccatgaaatgtgcacacaggctgtccccctgcccatcccatcctgctggacaggatggaggaagtgagagaacaggcagggtggacagctggggtgcagggagaggcaggtgcattctgggaggtcaggatctgtgagggctgtgggctcatcaggtggagtaggctccaggtgcaccatcagtgcactgggcaggtctcaggccaggcttcctggaccccggctgggtgatgtggtcactccctgggggactgctgtcagaccttggccacgcccccttggcagcaccgtcccatcctaggactggactttctgagtcctgagacaggacagtgcttcccagacctgacagactgggaggacctgttaagtcctccatccctagaccagcctcccaaaagcagggacagtctcctacctttaccttcagggcactgactgatccatctcattctaaggcaaccaaggcagagctgaggacctgtgccaggctgggagccagtcttctccctaaatgggccttagggaagcctcatccctgtcccagtgcactgcaagtttcagctcaggagacacatagggaagggaggatgggtcctccccactggctgaccctggaaaagcaggacctgggagaagagagagtgcagggctggcaggtgatgctccaggcccatggagagctcaggctccaccaaggggctgcctatcctgggctggaggctgtgccctctgcaggatctgaggaagtccagtcgtgaggtgggacagtgctacccagggtgggtggccagcgcctgacaacagtcccccagtaagtgaccacatcacccagccggggtccagagagcctgggccaagacctgcccagtgcactgagcgtgcacctggagcccaccccacctgatgcccccacagccctcacagggtctgacctcccagcatgcacctgcctctccctgaaacccagctgcccaccctgcctgttccctggcctcctccatcctgtgcagaccatagactgtgaccctctctctgaccactctggcccttcctttacctttgtcccatcagaatctctgagcaagatctcccaggtccatccagacacctgctttgtccacttttgactgggccattgaacaccactgggccaccccaactgtccacaggctccttgataacatgcatttcccctgacatttcccagtagtgctcagcagcccccactgaccaggtccctgctgagcagattcagcatatcagatcctccctgaccacaccctcactgattagacccccttcaccaggcctcactaactagattcccgctgccaggcccacaatgaccaggactccacagacgaggatcttactgacaaggcctcactggcaaggcctcactgaccaggtccttactgacaaggcctcactgatcaggttccaccgatcatgaccccattgcctggtcccacagatgaagccctactgactaggcctgcagggaatatgatgccagtgaccaggcccctgctaaccaggcctgaggtgaccagatgcccctgaccaggaccctaatgagtatgccccactgaacaggtatgcactgctcagatccctgctgaccaggtcaccccgtagaccagtgctacaaaagccaccactgatcaagtcctctctgaccaggcccccactgattaggtttccacggaccagcctgccctgaccagggccccactgacaagcgcctctgctgactaggtcccatgtgaccaggcctccactgaatagcaccccttgacctggtcaccagtaacccagcccaatctgacaaggccatcactaagccccagctgacaaggtctccactgaccaagtcccacagcacaggttggcattgaccagacaccaaacatttgtctgccactaggaacccactcaccaagacctgcactactagatccctctaatgagaccctctctaagcagacccctgctgaccaccccccactaaataggccttacgaccaagtcccgattgactaggtccactgagcaggcccacactgatcaggcccctcctaaccatatcagaaggccaagcagcaaagagatgtttcatatggcaggagtaggagcaagacagagaaaggaaagaggtgtgacatcctgttagacaaccaaatcacatcagaactcactcccaggagatcagcatcaagaagactaaccaatggtgaaggattctccacccacaccaccgcccactgcttccaggcagaagcctcctgcagaggcagaacctcttaggaaacttccactatggcagtgcagaaggaaaatataggctttgagcccccacacaggaggccaccatcctccagactccagatttgtaagcccaccaacagctcacaccctcagtatggaaaagctacaggcactcaacaccaacccagcccatgacagcagccatgggggctacaccctgcaaagccacaggtgcactgtcctagtagaggtttcccatgagcctctgcctctgcagcaggttactcccaccctcccaccaccctactgacaacctactcctccccacactaccaccccttttccttccaccccaaccccctctcatccaagattaaaacacctcccacctggcccacctccaacattaaggatgacacgtgagttatatagggacacacagccaacccatattattctgaccctgataccccagaacctcatgtccttctcacagagcaaaacaaaatcatgctttttcaaaagtttccaaaagtcttaactcattccaaatgtaaaaatttccaagtctcatctgagacaaggttacagtcccttctgccaatgagtccctgaatttaaaagggatttcttttccttcaaggtacaacaggcattgggtaaggtttctcaatccaaatggaagaaattccccagaaaaataacacaaatgcaagtccaaaacccagcaggacagtattcactcaatctcacagctccaaagtcatcaaaagaacgcactgtcatgcggacagcattaaggagatagtgtttacccatttgtgaagaatctgctcccccaccctcatctttcactcccacccacaaaataatctctcccattctccccacacccctacctccaacacccactcttctccatgatcaaatcacctcccaccaggtcccacctttaacattccccactacaattccacatgagtattggtagggacacagaatcaaatcatattattctggctcttgctccccaaatcttgtatccttgtcacactgcaaaatacaatgatgacttctctacttccccccaatgacttaactcattccagcatttactgaaatgtacaaggacttacagaccccatgcaagtcaaaaacccagcaggccagtcattgaatcctacagctccaaatcatcctttctgaatctacatctcacatctagagcacaggtttgtgatgcctgggttcccaaggccttgggcagctctgtgcctgtggctgtgcagggtctatcccccacagctgtcctcatgggctgggctggtgttgagtgcctgtagcttttccacactaaggatgccagctgttggtgcgtctatgaatctggggtctggataatggtgcctccatatttagggactccagccctatattcttcttctgtactgccctagtaaaggtttcccatgaggctctgcctcttggaaaagattctgcctgaacacccaggtttttccttacatactctggagtctagacaaaggctcccaagcctctagttttgtcctctgcgcagctgctggcttaacactgtgtggaagccaccaaggcttgaagcttgcacccctgaagcagtgatgcaagctgtacctgtgcatctttcagccatggctggaactagagctgcagggatgcaggcagcagtgtcctgaggctgcacatagaggggggtcatggaactggcccaggaaaccattcttctctccgaggccccagggcctatgatagcaagggctgctgcaaagttttctgaaatggcttcaaggccttttccctattgtcttggctattagcactgggctccttttcatgcaaatttctgaagccttcctcagttttatcctgaaaatcagcttttctttttgaccatttggtcaggctgcaaatttttgagttctgtttctcatttaatattagagttgggactgatttaatgtaagacccatccagatgtcatttcctcagtcacacataagggcacaggctgtttgatacagacaggacaccccttcagctttgctgcccagaagttcattccatcagatactcagtaagccgtcaccctcaaattcaaagtttcacagatctccagggcagggtcactgtgcagccacgttctttgctgcagcaaaacaaaagtaaccttggctcctgtttgcagtaagtccctccttttcatctgagagcttcttaatctgatccttactgtctattttcctatgagccttctgatcacaagtatttaacaattctttacaaagatccaaactttccctcatctccctgtcttcgaagtcctccaaactctcccaaactccatctgctacccccttctgaacctgcttctatattatcagctatctttgtcgcaggctggcaatgtggtaaaggaagacaagcccattttctggggaaaaattcaaggaggcttcagatacttgagtgaaaagaagctgagtgctgattgccaagacattagggagaaggccttgaagacacttaatagatccactttgcagtcataattttctccatgatcataaagaaaacaggtttaattggttaatgattctgcagactgtaaggaagcatagtggcttctgcatctgacaggactcaggaagcctcccaatcataccagaatgtcaaagggcaaggagatgtctcatatggcaagagtaggagcaagacagagaaaggaaaaagttgtcatacccattatacaagcagatctcatgagaactcactatcacaaggtcagcatcaagaagatggtgcttaaacattggtgaaggatctgacccacacacccaactcccactgtttccaggcagaagcctccttcagatgcagagcctcttgaaaacctctattatggaagtgcagaaagaaaatatgggcttagagcccccacacaggttgtcaccaacctccagatcccagattcataggcccaccaacaactcacacccttggtgtggaaaagctacaggccctcaataccagcccagcccacgagaacagctgtggggctaaaacttgcaaagccacaggtgcacttccctagtggaggttttccgtgaggctttgcctctgcagcagtctactcccccttcctacttccccccaccctcccaccaccctactgccaacccactcctccccatcctaccgatcccttttaccttccaccaccaccaacctcctgtccataattaagtcacctgcttcaacattagagattacaattccacatgagtttcatagggacacacaggcaaaccatataattctgaccctgatattccagaatctcatgtccttatcacagagcaaaatacaatcatgacttttcaaaagtttgaaaaagtcttaactcattccaaattttaaaaattcaaagtctcatctgagataaggccacagtcccttctgcctatgagtccctgaatttaaaatggagttcttttctttcaaggtacaatgatggtagaggcattgggtaagatttctcagtccaaagggaagaaatttcccagaaaaataacacaaatgggcccacaggcccaatgcaagtccaaaacccagcaggacagtattcactcaatctcacagctccaaaatcatcaagagaactcactgtcatgtgaacagcattaaggagagtatgcttaaccatttgtgaaggatctgcccccccaccctcatctttcactcccacccacaaaataatctcccccattctccccactcccctacctccaacacccattcttctccatgattaaatcacctcccaccaggccccagctttaacattccccattacaattccacatgagtttggtagggatgcagagccaaatcatattattctgaccctggtccccatatctcatgttgttctcacactgcaaagtacaatgatgctttctctacagtttcccaatctcttaactcattccagcatttactgaaatgcccaaagcccaaagtctcttctgagacaaggctgccatatgttctacccctgagcctctgaaatacaaagcaagtacttccaaagtacaatgattgtacatgcattgggtaagtattcccagccaaaaggaagaaatttgtcagaaagaagcacaaaacacagttgggacttacagaccccatacaagtcaaaaacccaacaggccagtcattgaattctacagctccaaatcattttttttgaatccagatcccacatccagagctcaaggctatgaggcctgggctcccaaggccttgggcaggtctgcacctgtgactttgcagggtctaacctccacagttgccctcatgggctgggctggtgttgagtagctacagcttttccacaatcaaggtgcaagctgctagtgagtctatgaatctggcattggcagaatggtgcctccctgtatggggttcgaaccctatatgttccttctgtactgccctagtaaaggaggctctgcctcttggaaaagtttcgacctggacacccaggtttttccatacatactctggagtccagacaaaggatccctagcctctagttttgtgctctgtgcacctgctggcttaacactatgtggaagccaccaaggcttgcagcttgcaccctctgaagcagtgacccaagctctacctgtgcatctttcagccatggctggagctggagcttcagaaatgcagccagcagtgtcctgaggatggacatagcagcggggacatggggctggaaaaggaaaccattcttttctctcaggtctcagggcctgtgatagcaagggctgctgcaaaagtctttgaaatgccttcaaggcctttttaacattgtattggctattagcactgaactccattttatgcacatttctgaagactttttgaattttcccactgataatcagcttttctttttgaccacttggccaggctgcaaatttttcaaacttttaagctctcctcatttaaatataagtttcaccttgaggtcatttctttggtcacatataggaccacaggctgttcgacacagacaggacacctcttaagctttgctgcctaaaatttcattccaccaaatacactctaaattatcaccctgatgttcaaaatttcacaggtctccacattaggggcatagtgcagcaacgttctttgctaaggaaaaaacaaaagtgacctttgttcctgttcccagcaagctcctcattttcatgtgagaccttctaagcctggtgatcactgtccatccttctgtcacctttttaattataactatttaacaagtctctacactgaaccaaacttttcctcatcttcctgtcttcttccaagacctccaaactctccaacctctggccattacacacttctcaacctgcttctacattttcagctatgtttgtcacagcctggcaatgtggtaaaagaagaaaagtccatttcaggagaaaaattaatgcaggcttcacatatttgcctgaaaagaagctgagtgctgattgccaagactatagggaaaaggccttgaaggcatttcatagctccactttatagcattaatttgctgtataatcagaaagaagagagattaaactggctgatggttctgcaagctttaaataaatcatagaggcttctgcttctggaaggattcaggaagcctcccaatcataccagaagaccaagcagcaatgggatgttttatatgggagacatagaaacaaaacagagagaggaaaaaggtgccacacattgtataaccctgttatacaaccagatttcctgagaactcactatcacaaggtcagtatcaagatgttgctgaaccattggtgaaagttctgccccctaccacccacacctctcactgtttccaggcagaagcctaaggcagaggcagagccactaggaaaacctctactagggcagatcagaaaaaatagatgggcttggaggccccatgcaggaggttaccatcctcagaccccagattcatagacccaccaaaaacttgcactctcagtatggaaaagctacaggcactgaacaccagcccagcctatgagggcagccattggggctacaccctgcaaagccacaggtgcactgccctggtagaggttttccatgaggctctgacactgcagcaggctactcccccttcctactgcccaccaccctctcaccaccctactgccagcctaatcctccccatcttacccatttgttttcccttccacccctaccaacctcccgtttgtgattaaatcacctcccaccaggtcccacctacaacagtcaggaatgcaattccccatgagtttttgtagagaaacacagccaaaccttattatcctgaccctgacacccccacatctcatgtccttctcacacagaaaaatacaaacacgtcttttcaacagtttcaaaaagtcttaactcattccagcagtaactcaaatgtagtaaattcaagtctcatccaaaacaagaccaatcttttctgcctatgagtccctgaatgtaaaagacaattcttttctttcaagttaaaacgatggcacaggcaatgggtaagctttctcaaaccaaagggaagattttcccagaaaaataacacaaatgggacacaggcccaatccgactccaaaacccagcaggacagcattcatttatcatgagaactcactatcacacagactgcattaaggagacagtatttaaccatttgtgaaggatctgccacccatccccatgtttcaccctcactcacaccatgaatgtccattcccccacatcccccttccaacccccattctctactatgattaaatcaccttctaccaagccccacatttaacattcccaattataattccacatgagttttggtagggacacagagccaaatcatattattctccctttggacccccaatctcacaaccttctcatactgcaaaatacaatgatgcattctctacagtcccccagtgtctgaactcattccagcatttactcaaatgtccatttgtgaaggatccaccccccacccctgcctttcacccctaaccccaccacaatgcccccaaccctcctcaccccctaatcccccccacactccccaccccaccaaccatcccacctccactctccaccatgattaaatcaccttccaccagcccctacctttaacatttcccattaaaattccacatgagttttggtagagacacagagccaaaacatattattctgtccctggtcccccaaggttcatgtctttctcacattacaaaacgcaatgatgccttccctagagtcccccaaatcttaactcatcccagcatttactcaaatgtccaaagcccgaagtctcttctgggacaaggctgccataccttctgccctgagcctctgaaatacaaagcaagttaaccacttccaaggtacaatgattgtacaggcattgggtaagcattccaagccaaaaagaagaaatttgccagaaagaagcacaaaacacagatgagacttaaaaaccccctgcaagtcaaaaacccagcaggccagtcattccatcatacagctccaagtcatctttttggaatctatgtccacatccagagcacaggttggtgtgatggctggaatcccaaggccttgggcagctctgcacatgtggcattgcaaaatcttccccctacagctgacctcattggctaggctggcgttgagtgcctgtagcttttcaacactaagggggcaagcagctggtgggtctatgaaactgaggtctggaaaatggtgcctccctgtatggggactccaaccctatactttccttgtgtactgcctgagtagaggtttaccatgaggctctgactcttggaaaagcttctggctagacactcaggctttctgatatatcctctggagtccagacaaaggctctgaagcttctagtcctgtgctttatgtacctgctggcttaacactacgtagaagccaccaaggcttggagcttgcatcctctgaagcagtgatgcaagctgtacctgtacatctttcatccatggctggagctggaaaaggagctgcagggatggaggcagcagtgtcctgaggctgcacacagcagtggagccatgaggctgggccaggaaaatattcttttctcctaaaccccagggccagtgacagcaagggctgctacaaaggtctctgaaatgccttcaaggcctttttcccattgtcttgaattattagcattgggctcctttttatgcaaatatccgaagccttcttgattttccccctgaaaatcagcttttctttttgaccacttgtccagattacaaattttccaaatgttaaagctctgcttctcatttaaatataagttccaacttatggtcatttctttcatcacacataggagcacaggctgttcgatgtaggccagacaactcttgagctttgctgcttagaagttcattccaccagatacaccctaaatcatcaccctcgagttcagtttcacagatctcccgggaagggtcactgtgtagccaattactttgctaagtcaaaaaaaaaaaaaaaccttagctccttttcccagtaagttcctcattttcatctgagaccttacaaggctatcttcactgtccatccttctgtcagccttttactcacaactatttaacaagtctctgcaatggtccaaactttccctcatcttcctgtcttcttccaagctctccaaactctctaacctctcgccactacccaatttggaacctgcttctacactgtcagctatctttgttgcagcctggcaatgtggtaaaagaagaaaagtccattatcagggggaaacatcaagatggcctccaatatttgcattgaaaaaagctcagtgctaatagccaagagaatgggggaaactcctagaagtcatttcataacttcacttcacagcattaattttctgtatctacataaagaaaagaggtctaattgactcacagttcttcaggctgtaaagaaagcatagtggtttctgcttgtaggaggactcaggaagcctcccaattataccagaaggccaagcggcaatgaaatgtttcatatggcaggagtagaagcaagacagagagaggaaagaggtgtgatatcctgttatacaactagatctcatgagagctcactatcaggagatcagcattaagatggtgcttaactgatggtgaaggatccgcccaccaccccatatccaccaccaactgtttccaagcaaaagcctgcggcagagacagatcctcttggaaaacctctactagggcagtgcagaaggaaaatatgggcttggagcccccacgccaccatcctccagccccaagagtcatggacccaccaacagctcacacccccagtatggaataccagcccagcccatgagtgcagctgcaggtgctaaaccctgcaaagccacaggtgctctgccttagtagaggttttccatgagcctctgcctctgtggcaggctactcccctcctgctacacaccaccctacagccagcctactcctccccacattacccacctgtttttacttccaaccccacccctctcccatccatgaataagtcacctcccaccaggccccacctgcaacattcaggattacaattacatgtgagtttaggtagggacatgcagctaaatcatactattctgaccccgatcccccaaatatcatatccttctcacagagtaaaatacaatcatgccttttcaaaagttgccgaaagtcttaagtcatttcagcattaactcgaatgtaaaaagttccacgtctcatctgagaaaaggctacagtcccttttgcctatatgtccctgaatttaaaagggagatcttttctttcaaggtacaatgatggtacaggcattgggtaagttttcccaatccaaagggtagaggtttgccaggaaaataacacaaatgggatcacagggccaatgcaggtccaaaacccaggaggccagtatccattcaatctcacggctccaaaaccgtcacgagaactcaccatcatgaggaaaggattaagtagatggtgtttaactatttgtgagggatcctcccccacccccacttttcatccctcacccccaccataatccacccattctccccaatctccaccttccaaaacccagtgtcctccatgattaaatcaccttccacctggccccacttttaacatttctgattacaattccacatgagtttccatagggacacacagccgaatcttattcctctgtctctgcctccccaaatctcatgtccttctcactttgcaaaatacagtgatgccttacttaccattccctaagccactatgcttttttttttacagcctacagaaccttgagccaattaaacccctttttgttatgatcatacagaaaattagtactgtgaagtgaaactatgaaatgccttcaatgacttttccccatcgtcttggctaaaacccccaacttcttaactcattccagcatttacttaaatgtctgaagcccaaagtctcgtctgagacaaagatgccatcctttctgctcctgagcctctgaaatacaaagcaagttaactacttccaaggtatgattgtccagacattgagtaagaattcccaccctaaaggaagattttttgccagagagaacaacgaaacacaaacgggacttacagatcccatgaaaatccaaaacccagcaggccagttattaaaacgtacagctccaaagtcatccttttttaatccttgtcccacatccagggcacaagggcatgagggctgggctcccaaggccttgggcaggtctgcacctgtggctttgcagttttcagttcccgcagctgccctcatgggctgtgctggtgttgagtgcctgtagttttcacccacagagggtacaaagctcttggtgggtctatgaatctggggtctgcatgatggtggcctccagtgtgggggctccaaccccatattttccttctgcactgccctagtagaggtttcccaagaggctctggtttttggcagccttctgtctggacacccaaacattttcatacatcttccaaaatctatatgaaggctccgaagcctctgggctagtgatctatggactcgctggcttaacactatgtggaagccatgaagccttatagcttctaccctctgaagcagtgatgcaatctgtacctgtgcatctttcagccaaggtcggagcaggagatggggctgctgggatgcaggcagcagcgtcctgaggctgcactcagcagcagggccatggggctggccccggaaaccattcttctctcctaggccccagggactgtgacagcaagggctgctgcaaacatctctgaaatgcctccaaggttttttcccccattgtcttggctattagcactggcctccattttatgcaaatttctggagccttcatgaattttccccctgaaaatcagcttttctttttgaacacttggccaggctgcaaatgttccaaacttttgagctctgcttgtcatttttaaatataagttccaacttgaggtcatttcctcggtcacacataacctcggtcacacaagagcacaggctgtttgatgcagacaggatcccccttgtgctatgctgcctagaacttcattccaccagatatgtactaaatcgtcaccctcaagttaaaagtttcacagatctcgagggcaaggtcaccctgcagccatgttctttgctacagcaaaacaaaagtaaccttggctcctgttcccagtaatttcctcattttcatctgagaccttgtaagcctggccttcactgtccatccttctgccagccttttaatcacaactatttaacaagtgcctacgatggtccaaaatttcttcatcttcctgtcttctttcaagctctccaaactctccaacctctggcttttacacacttctgaacctgctttacattttcagctatctttgttgctgcttggtaatgtagaagaaaaagaagtccattttcagggggaaacttcaagaaggcttcagatatttgcattaaaaagaagtccagtgctaatagtcaagacgatggggaaatgtcattgaagatatttcatagctccacttcacagtactttattttctgtatgatcataatgaaaaggggtttaattggcccatggttctgcaggctgtaaagaaagcacagtggcttctgcttctggaaggactcaggaagcctcccaatcataccagtaggaaaacagcaatgaaatgtttcatacggcaggagcaggagcaaggctgagagaggaatgaggtgccacatcgttatataaccagatctcatgagaactcactatcactaggtcagcatcaagaagatagtgcttaaccattggtgaaggatccaccccccaacacagttccacctcctactgttccaaacagaagcctgctgcagaggcagaggctcttgggaatcctgtactatggtagtgcagaaggaaaataagggctttgagtgactatgcaggaggcaaccatcctctaaaccccagattcatagacctaccaacagttcacaccctcagtatggaaaagctacaggcactcaacactagtccagtctatgaaagaagccatgggggctcagacctgcaaagccacaggtgcacttccttagtagggattttccatgaggctctgcctctgcagcaggctactcccccttcctactaaccaccaccctcccaccaccctacagacagcctactcttccccaccctacccaccccttttttcttccacccctacccctcccatccatgattaaataatctcccaccaggtcccgcctccaacatttgggattacaattccacatgagtttttccaggggcacacagccaaatcatattatgctgaccttgaccccccaaatctcatatccttctcacagaataaaatacattcatgtcttttcaaaagtttccaaaagccttaactcattcctacattaactcacatgtaaaaagttcaaagtcttatctgagacgaggctactatctcttctgcctatgagtccctgaagttaaaaaggtgtttgtttctttcaaggtacaatgatggtacaggtattgggtaagctttctcaatccaaagggaagaaatttccaagaaaaataacataaatgggaccacaggcccaatggacatccaaaatccagcaggtcagtgttcattcaatctcacagctccaaaatcatgaagagaactcactatcagaaggacagcattaaggagatggtgtttaaccatttgtgaaggatccacccccacctctgcctttcacccccaaccccaccacaatcccctccaaccctccccacccccaatcccctccaaccctcctcgccccccaatcctccccaaccctccccgctccccaaccatccaaactccactcttcaccatgattaaatcaccttccaccagcccccacctttaacatttcctattaatattccgcatgagctttggtagagacagagagccaaaacatattattttgtccctggtcccccaaagttcatgtctttctcacattgcaaaatgcaatgatggcttccctagagtctctcaaatcttaacccattccagcatctactcaaaggcccaaagcccagagtcttatctgagacaagtgtacagtcccttctgcccatgagtcactgaattataaagaaactttactacttccaaggtacaaggattgtacaggcaatgggtaagcattcccagccaacagaaaaaaaaattgctagaaagaagcacaaaacacagatgggactcataggatacataaatgtccaaaacccagcaggccagtcactcaatgctacagctccaaaatcatcatttttgaatccttgtcccatatccatggcacagggctgtgagggctgagctcccagggccttgggcagatctacacctgtggcattgcagcgttcagactccgcggctgtctctcatggacagggctgttgttgagtggccgtagcttttccccactgagggtgcaagctgtttgtgggtctatgaatctggggtttagagaatgatgcctccctgtgtgggggcttcaaccctataggtcccttctttgctcccctagtagaggttccccatgaggctctgtctcttagaaaagcttcttcctgaacatccaggattttctatacatcttctggagtctagacgggagctcccaagcctctaatctctttctctgtgcacctactggcttaacactatatggaaaccatcaagactttgagccacctctgaagcaatgacccaagctgtacctgtacatctttcagccatggctggtgctggagctgcacggatgcaggcagcagtgtcctgaggttgagtacagaagcagggccatgagactggcttaggaaaccattcttctctcctaggccccagggcctgtgacaacaagggctgctgcagacatctctaaaataccttcaagtccggtttcccattgtcttggctatttgcagtgggttcctttttatgcaaataccctaagccttcttgaattttccccctcaaaattggcttttctttttgaccacttggccaggctccaaattttccaaactttagatctccacttgaagttccaacttgaagtcatttcttaggtcacccataagaacacaggctgttcaatgcagacaggacacctgttgtgctatgctgcctagatgtttatttcaccagatacatcctaaatcatcacccccaagttcatagtttcacagacctccagggcagggtccccgtgcagccagcttctttgctaaggccaatcaaatgtaatcttggctcctgttcctaggaaattcctcattttcatctgagaccttttaagtctggacttcagtgtttacccttttgtcagccttctgatcacaagtatttaacaattctctatagtggtccaatattttcctcatcttgctgtcttccaagctttcccaactcttctgacctctgtcttttacacacttctgaacctggttctacattgtcagctatctttatcacagcctggcaatgtggtaaaacagaaaagtccattttcagggggaaaattcacgaaggattcagatatttgaatgaaaagaagctgagtgctggttgccaagacaaaggggaaagggccttgaaggcatttaatggctccacttcatagcactaattttctgtatgatcataaaaaaaagaggcttaattggctcacgattcagcaggctgtaaaggaagcatagtggcttctgcttctgggaggatcagatcaggaagcctcccaatcatatcagaaggccaaggggcaatgagatatttcaaatatctcattgcaggagtagaagcaagactgagagaggaaagaggtgccaccccctgttatataaccagatctcatgagaacacactgtcatgaggacaacatcaagaagacgttgcctaaccattggtgaaggatctgactcccacccccacctcccactgtttccaggcagaagcctgctgcagatgaagagttcttgggaaacctctactagggcagtgcagaaagaaaatatggacttggagcccccacgcagggggcaaccaccctccagatcccagattcataaacccaccaacagcttgcaccctccgtgtggaaaagctacaggcactcaacactagtccagtctatgaaagaagccatgggggctcagacctgcaaagccacaggtgcacttccttagtagggattttccatgaggctctgcctctgcagcaggctactcccccttcctactacccaccaccctcccaccaccgtacagccagtctaatccctcccaccctacccacccctttttcccttccacatccacccgtacccatccatgattaaatcactccctcccactccctctcatactctaatccctccaagcccttccaatctttgtttgctacccactattgagcctgcttctactttttcagatatctgtatagcaggttggctatgtagcaataacaaaaatcccatttaaggggaaacattcaagaagatttcagaaatttgcatataaagaagccctgtgctaatagccaagacaaagggaaaaaggccttgaagacatttcacagctcctctctgcagttctaattttctgtattattgtaaataaaagaggtgtaattgactcatgattctgcaagctgtgaaagaagcattgtgtcttctgtttctgggaggaatcaggaagactcctcattatatcagaaaaccaagggacaatgagatgtctcctaaagcaggagtaggaggaagacagagtgagggaagaggttccacagcctgttaaacaaccagatctcatgagaactcactcactatcaggaggatagcatcaaggtgatggtcctttatcattcgtgaagtatctacatgcaccattttatgactaaatctttttccacctaggccccgcctctaacattacaaaatataattccacatgagttttggtagggacatagagaaaaaccatattattctgcccctgaccccatgaatctcatgtccttctcacattgcaaaatacaatcatgccttggcagcagtctcccaaagtcttaacacatttcaggattaactcaaagttacaaagtccaaagtctcatctgggtcaaggctgcagtctattttgcctataagtctctgacataaaaagcaagttcactgcttctagggtacaatgatggtacaggcattgtgtaagctttccatatccaaaagaaagacattttccagaaagcttcttatttctctctgagacctcctcagtctggccttcactgtccatgtttctgtcaggatttttgtcacagccattgagccagactctaagatggtccaaaagttttctcatctatctgtcttcttttgagccttccaaactcttccaatctccttccattacctggttccaaagttgcttccacatttccaggtatctttatagcaatattctaagtccccatttgccattttctgtatgatttactttgaaaaagaggtttaattggctcatggttctaagcacagtgcttctgcttctaggaggcctcagaaatctttcaataatcatggaaggcaaagaaagaatcagttgtctcacatggcaaggggaaaacaaggagagtagggaggggacatagagttttcagtgaccagatctcatgagaagtcactcattattgtgagaatgctacaaggggatggtgctgaaccactcatgggaaatttgccttcataattcaatcatcttataccaggatccaccttccacattaggaaatataattcaacatgagattcggtagagacacatattcaaattgcatcatcaatatttgaatataaagacatccacagcaggctttatccagccaacttctttgagactctttatagggtttgaggtctagagcatatacactaaaatattcatacttcaaaaagcaataaagtggtattatcatttttccaaaagttacagcagtagtttaggcattcatagcatgatttaattcacatttgctactgtttctattctatcaccatattaactgtttcctatacaattttgtattcagctggatttcagttgagcacaaaaccatccttgtactagctctttgctagtgttattattctgctgtagaaagtatccttgaactggaaacagtccacgattgagtatcgagtcattcaacactatcaattcctgggtagctttttgaaaaagtagtatctcttgttgcaagaaatgctgcatctgtgagtccatgtctctcactggaattggatggaagtggtgaatttcagccaaagcggccaaagaaatcctgttcctgtgattctgacatcatcagcctctgcatctctgtcttcccttctgccacatgttgcctgctctctgtgactttggtaagagcttccttgtgtatgtggatgatgtccaagatgttggtctgatgtccctgagacagcactaacaggtccatggctgggtccagatcctgcctggactgattgacaaagagctcactgacagtttggaagacgctctttcttaaagcctgtcaccactcattggctgtgaagttgagctgagtgccctgttgtccatcttcttggtgaagcacttgaagccatcaatcttgctctcccactcctaaaggttgagtgtcaccctgagggagggctcagggccaggaagaatctggcactcaccatctcatccttctcagccttcctcttgccctgtctccaggctgtctcttcagtgctggtggggcacatcaggaagtgacaaaaaatgtggcactgtgcctgcacccagaagctggctgtgtggttcatctaccagattgggccctttctgcactggaacataggtccacttcaccatagattccttccacactgtcagtgagctctttgccaatcagcccaggcagaacctgcacccagtcgtggacctgttagtgctgtctcagggacaccaggccaaaattctggacatcatccacatatccaaggaagctcttaccagagtcctcctcaagatggcctgtggtctgcctcttggcacctgagaagcccacagtgctgtagaagccccgatgcatggactggagccccaaaggtggcacacactccgctcctgagccttctgcttgtttcctctatgtggctccatttgcagcacatttgttgcactgaggcctatgcatcccaggcaaagccaagctggctcaaagagcaacgagccacctctgcaagggtgtgccaggagccaatggaccagccaccaacatcactccctgccagtcagggtaaatcagttattctgccctggaggtagagccccagtgccatctgcttttcctcaggtctccactccatcagctgtcttgtggtggtcactcaggctgtgggaacctggccatccctgtttccttgagtgggtgaggttggtgactgctccacctgctcctggcacacccttgcagaggtggctggttgctctttgagccatcttgtccttgcctggcatgcacaggccccaggtactgagaagttgctccgagtaagcttgtcttggcccaaattctaagtctggccaaggccacagaaggccgagtcccctgggtggtaatcctggctgcagcaggggggcacatggtgcccctcccctcccagggctcaggatgaggtccgactgggataggatgctttaggtatgggacttgtgccccaggagggggcctctgtcacacagagcctctataggtgctccccaatctctgccctccccacccatggtggtcctggggatgcagacagaggaggggcactgcatattgctgagagggctggcatcctctctaggtggaacataggtcatttgtaaagttgtaggcctgccaagcaatattggattcaacacattttctcaccttctcttaccagccaccctccagggttccctgactcacctccctgcagatggaggcaaggaggctccacagtcaaaccacagaagatgtatggcatgctgctggctaccagggctgttgggatgcacgttcacccttcccttcagggacctcaaagtgaccagcttccccttgaagaatgactctccaaggcccaggagccatctggggctgcagagcagctggccacatgctgccctggcttcttccatgttgtgctggtcactacccaccaaggggggtcagatgcaggcacgatgcaggatggttgtctctggacctgtgtcttggttatcatggagctggactaggcctggtgacagggccctgatggggttgtcctgggtggtcacgggggtgatgagaaaagatgcagaatggaattgctgtgaggatgaatgagacgactgtcagcacagaacaggcacccggtgagtgttcagggattaccctcagtagctgcccagaggccaaaaccgcacacctgatagtgactgtccccaagccaggaggaagagaggagagcaggtcccactcacctgagtctgatcagtgagctttgttgagatgtgcctgtcatctagaaaatggtccttcacgcagagctactcacagacactgctgtgtgtctctaacttctccacaacacagaggccatggggactcaggaagagtgacactgtggggtgacacaacccaccacaacgggagcctgcttgggtcaacagggcccagcgtcagggtcctctgtcccctgaactgacatgtgggtatgcaatgtgtttgtgtatgcatgtgtgcctgtgtgcgtgcgcgtgtgtatgtgtgtgtttgtcttgcttctctggacaggcctagcttctccactcatgggtgcccccaggtcctcatcactgtcaccttagagcattagagcctctataggtgctccccaatctctgccctccccacccatggtggtcctggggatgcagacagaggaggggcactgcatattgctgagagggctggcatcctctctaggtggaacacaggtcatttgtaaagttgtaggcctgccaagcaatattggattcaacacattttctcaccttctcttaccagccaccctccagggttccctgactcacctccctgcagatggaggcaaggaggctccacagtcaaaccccctgcctgaggtcacatagtggctagcaggccacgtactgactaaccgcccctgaccaggttcccagtaatgagtgatgaggcccctaatgaccactcctccattgaccaggtcccactgatcaagtccccactgaccatgtcttcctaaccaggcccgcacttaataggcctcatgggccagaccccactgaccaattttccactgagctggtccccactgacaaaaccgggttcccactgacaagaccacaatttaccaggttgctgctcacccgacccctcactgaacaattctccatggatgagtccccagctgactgagccccctctgaccaggccctcactgaccaggatccaagccactaaggccccacatcgaccaggaccctggtatactgtatatgccccaccaaccagtttttcattgtttatgttccaactgatcaggccccactaataaggccaccactgactaggtccccccactgaccaggcttccaatgactaggtcaccaggtccccactgatgaggcctttactgaggagaccaccactaaccaggcccctgctgatcaggtcccaaatgactaggtcctggtgaccaagtcatctctgaccatggtccattgaccaggcctatgagcaacgggactcaaagtctcattacaatgtccccctcagctcatagaccctccctccctgcgtgtgtggccagaggttaggccctgggggtttttttgagacatggtctttcctccaagacacagggaaagacagttggcctcaggctccaggttcccagctccacactcaccccaaaggccctctggccccatctcaaaggagacagtgaggtggcctgacactgcctggacacgccatctaccctattcctgagtgtcagagtgtgaggaagggagggacatttggcaaatgagacaccctgtgctgttgggtctcccagggcccttcccatacagccccgatctaaagacacaacacaaaggctacaggaagactaatccagaacctctgagtctcagacagggaccacctgaggactctccccagacagccagaaggccctttgctagtttcttggtacctcagtggatgtggcagcagttcttctgttggggaccagtgagtacacgctggggagggctcacctgtgcttcctcattggctccacttctgcttctaaaaaaaattactcattccagagctggggcagagaaaatacaagatgagcttagaaaatcttctgccagaaagtaaaaaagtgctgacagagtaatggagacaaatcaaagagacataaagtcaggttggaatgtctactactggcctaatcttggggaattggagcatcagaatcatgagctttccttctcccttatttattggttttatttctccatgtagaacaaagaagagaataagaaaataatcatctggcaaccatcaaagtaataattgttcaaacacaagtcatccatgaaatgctaaatctagtgggttctgaggagttaccagatatttacagagcctcaaagtatctccatacaaaatacggttgaactacaaaaagaaaatcataacattagtatggacaaacctggcaggtactccttaagtctcctaagtaataaaaactgtaaaatgcaaataagcctttgatgacctttactaacctttactaaagtatcgatgacgtggttgtttaaacagctgacatttgggcaatttgagtatgtcaaactcaataatactggttttcatttgcaagatccacttaaaacttaaggaggttaaaaaacatcatttaaaataccctataaattatcttcatacatatgatacaaaaatatcctacttcagtaaatgttgtaatgttatatattttgtgagaaacaattaaaacgtgtaaatagcctggtaataaagttttataatcctttaaatcatacaatttttccttaagactttatggttaaatattctctttgttagatatggcttaccagtggattctagagaagaaagtagatgggagcaagtgtccaacacagcaacagctggaaagaaaaataaagaattatgttctttacctaaaacacttcagttaactaagtgtgcgtttaaaaactaaagagttgagaactttatcagatttaataagaatgagaaatatgtatgtacatttacaatacaaaattactatttaataaattacacatggcattaattctaattgtgtttaaataccagagctttttcattcttcattcatgtaatcaacagccacatgctaaggtactagaaccagcactggaattgcaagatgaagatggcatggtccacctctcaacaatcatatgctataaactaaaaaaacagacaggaaggcaatgtccatatagagtcatagatactatgataggtatagagcagagcactactggaacacacagaagtgacatctacccacttttatgtcaatatcatgggctttctggtggaggagataacatagattgatacctgaaggacaaggaaaagtttcccagatagagggaagaggcgaaggcaaagagcctgaggtgaggaagagccctgcagagttccactccatccagtttggtgctaaagcaaagggcagagtgcagtaactggtgagagacaaggctgagtaacttgatgagaattactttgacatgggagtttttatttcatggtgaaaaatatggaacttttcctgagaacaagtgtaagccactgacacagtaaatgacaggagatttaaaaggccacctgtcaagtgactgcttatgaagggttattgctcagctaagtatttctgaatgagtcttaggtctgttggccttcaatctctaccaaaacctttgttttttgatgatgcctttgttttctgagaatcgtttcagtgtgctggctgacagttccatgaagatggcgaaacttaagaaagtgtagagccagtgaaaaagagatgcccagacttcttaggaattgtttaagctatggaacatgatgaatttatggtgcataagtacagtcttctctgtgaaagtttttgttttcacatctttcatttgaagtgtgtaagaaaaaaatgcttgatgtagtatctactaacccaagaatgaaaaggaatgtcatttgctatttacactttatttctaaaataaacctgaatttaattaataaattttggcaatgtacttctctttgtttctctaattatttgttctacacagtctgcctccatctacaataagtaaaaataatattaatgtttaagttaaacaaaaacattatcatgaaaataaggtatctcttataaaatgtggcctttagtatttttagtgactagacataacttgaaatttgcttaaatagaaaaataatcacattaataaagtaaaatttctacttattttaagtttagataacagaggatgtatatgtgtaatgctgtttagagtaatctgacaaaaatgcagttaatattaatctattgcatatacatggttttagaaaggaagtgttttattagaacaaaggttaaacaatggccaggcatggtggctcatacctgtaatcccagcacttggggaggccaaagcaggcagatcacaaggtcaggagattgtgaccatcctggccaacatggggaaaccccatctctactaaaaatacaaaaattagctgggcgtggtgatgctcacctgtagtcccagctacttgggatactaaggcaggagaattgcttgaagccaggaggtggaggttgcagtgagccaagactgcaccactgcacttcagcctggtgacagagtgagaccttgtctcaatatacgaaaatcaataaatgtaatccagcatataaacagagccaaagaccaaaaccacatgattatctcaatagatgcagaaaaagccattgacaaaattcaacaacgcttcatgctaaaaactctcaataaattaggtattgatgggacatatttcaaaataataagagctatctatgacaaacccacagccaatatcatactgaatgggcaaaaactggaagcattccctttgaaaactggcacaagacagggatgccctctctcaccactcctattcaacatggtgttggaagttctggccagggcaattaggcaggagaaggaaataaagggtatgcaattaggaaaagaggaagtcaaattgtccctgtttgcagatgacacaattgtatatctagaaaaccccattgtctcagcccaaaatctccttaagctgataagcaacttcagcaaagtgtcaggatacaaaatcaatgtacaaaaatcacaagcattcttatacaccaacaacagacaaacagagagccaaatcatgagtgaactgccattcacaatttcttcaaagagaataaaatacctaggaatccaacttacaagggatgtgaaggacctcttcaaggataactacaaaccactgctcaaggaaataaaagaggatacaaacaaatggaagaacattccatgctcatgggtaggaagaatcaatatcgtgaaaatggccatactgcccaaggtaatttacagattcaatgccatccccatcaagctaccaatgcctttcttcacagaattggaaaaaacgactttaaagttcatatggaaccaaaaaagagcccatatcgccaagtcaatcctaagccaaaagaacaaagctggaggcatcacactacctgacttcaaactatactacaagtctacagtaaccaaaacagcatggtactggtaccaaaacagagatatagatcaatggaacagaactgagccctcagaaataaagccgcatatctacaactatctgatctttgacaaacctgcgaaaaacaagcaatggggaaatgattccctatttaataaatggtgctgggaaaactggctagccatatgtagaaagctgaaactggatcccttccttacaccttatacaaaaatcaattcaagatggattaaagacttaaacgttagacctaaaaccataaaaaccctagaagcaaccctaggcattaccattcaggacataggcatgggcaaggacttcatgtcatgtcgaaaacaccaaaagcaatggcaacaaaagccaaaattgacaaatgggatctaattaaactaaagagcttctgcacagcaaaagaaactaccatcagagtgaataggcaacctacaaaatgggagaaaattttcacaacctactcatctgacaaagggctaatatccagaatctacaatgaactcaaacaaatttacaagaaaaaaacaaacaaccccatcaaaaagtgggcaaaggacatgaacagacacttctcaaaagaagacatttatgcagccaaaaaacacatgaaaaaatgctcatcatcactggccatcagagaaatgcaaatcaaaaccacaatgagataccatctcacactagttagaatggctatcattaaaaagtcaggaaacaacaggtgctggagaggatgtggagaaataggaacacttttacactgttgatgggactgtaaactagttcaaccattgtggaagtcagtgtggcgattcctcagggatctagaactggaaataccatttgacccagccatcccattactgggtatatacccgaaggactataaatcatgctgctataaagacacatgcacacgtatgtttattgtggcattattcacaatagcaaagacttggaaccaacccaaatgtccaacaatgatagactggattaagaaaatgtggcacatatacaccatggaatactatgcagccataaaaaatgatgagttcatgtcctttgtagggacatggatgaaattggaaatcaccattctcagtaaactatcacaagaacaaaaaaccaaacaccgcatattctcactcataggtggcaattgaacaatgagaactcatggacaaaggaaggggaacatcacactctggggactgttgtggggtggggggaggggggagggatggcattgggagatatacctaatgctagatgacgagttagtgggtgcagtgcaccatcaagtcacatatatacatatgtaactaacctgcacattgtgcacatgtaccctaaaacttaaagtataataataaaaaaaagattaagtaattaaaaccatcttttgcagtgaatggattgctttgaaattcttagaaaactctgccctttataaaagtttaatccattttttacttcaataaattttatcttaaaaagaaatttctattctctacttatagtaaacctttcttttttttctagtttgtattctgaattaaggtggtacctctgtaggtttctttcaaaggcatatttacggatgccgaggttttcagtacaattgaactcatcacacaggtagtgagcataggacccaataagtagtttttcaaccctggcccactctgttcctccccattcttatttcccagtgtctattattcccatgtttatgacaatgcgcacccaatgtgtagctcccacatgagtgaaaagatgagatatttggtttctgtttctgcgttggtttgcttagaagagtggattccagctgtatccatgttgctgcaaatgacgtgattttgttctttttatggctgcatagtattctatggtatatatggaattttccaatctaccttggattttcaatctaccgtggatgcacctggattgactccacgtctttgctattgtgaatagtgctgcaatgaacatacatgtgtatgcatctttttattacaatgatttattgtccttttggtatacccctagtatagtaatggggttgctgcatccaacagtcattcttagttcttaatttccaagctgctctccatagtagctgaattaatttgcattgccacaaacagcgtgtgttcccttttctccacagcctccccaaaatcttttttaatttatttattattttttttaacaaaagtcattcggactggtgtgaaatggtatctcactgatgttttgtttggcatttttctgatgattagcaatggtaggcatttgttaatgtttgttggccactacatgtgttatttcaagaagtgtctgttcatgtcctttgcccatttttaatggtgttatttattttttgcttgttgatttgtttaggtctcttatggattctggataataggataataggcgtttgctatatccatagtttgtgaatattttcttccattctttaggctgtccgtttaatcccgtgataatttctcatgctgtgcagaagctatttagctaaattagatcacacttgtcaatttttgttattcttgcaattgcttttgaggacttagccataaattaattgacaaatatgatgtccagaagagtacttcctaggttttcttccaggatttttatagtcagaagatgtactcttatgtaagaaaagcacaaatatttttatttttttatttttatttttttgagatggagtctccatcacccaggctatagtgcagtggtatgttcttggcttactgcaacctctgtctcctgggttcaagtgattctcctgcctcagcctcctgagtatctgagattacacatgcctgccaacacgccttgctaatttttgtattttaactagagacaggtttcatcatgttggccaggctggtctcaaactcctgacctcaggtgattcatctgcctcggcctccccaaattttgggattacaagtgtgagccaccgtgcctgggcaagcacaaagcttttaaaataaaaatggaaatgaacattttagtgttttgtttaattcataaaatgcaattattttggattctactaaataataaacatccatatgtggcaaagtgttttgatgccaatcattcagttgtgattatgggtgggaagagttgagatggtgcaaataaactttttttaaaattttttattttcaagatggagtcttgccctgtcacccaggctggagtgcagtggtgcaatcttagctcctgcaacctccgtctcccaggttcaagcaattctctgcctcagccttcctagtagctgggattacaggtgcccaccatcacaccagactaatttttttttttttgtacttttagtagagatggagtttcaccatcttggccaggctggtcttgaactcctgatctcgtgatacacctgcctcagcctcccaaagtgctgggattacaggcatgagtcacagcacctggccggtgcaaataaactttaaaagtgacatgggccgggtgcggtggctcatgcctgtaataccaacactttgagaggctgaggcaggcagatcacaaggttaggagttcaagaagagcctggccaatatggagaaaccctgtctctactaaaaatacaaacattagctgggtgtaatggtgggtgcttgtagtctcagctactcaggtggctgaggcaggagaatcacttgaacccgtgaggtggaggttgcagtgagtggagatggcaccaagacactccagcctgggtgacagagtgagacactgcatcaaaaaaaagaaaaaaaaatgtggtatgaaccacagctaaactacaatcaattagagagtaagccaaagcatctcaaagtatatcatcagttatcaggcaataacatgcaatttctaaatcctaacctatatgcagcttttaaagacattttaaacgtgtcagtttagtcacatttattgaataaagttagcaaatggatatctcttgaaaatgagagctccagagaattaaaaaatgtaaagttcccatttcctttctgtgttaacacagctaattatgatctttacttaacatgcaaaagtcaacagaacaactcagtatctcaccaaattaaaaacaagaattacactagagaaatgaaaccctaaagaaaaacggtcatataactaacctcagtcaagtagttctggcagttatttgaagtctgagggtttgaagtaggaattcttactggcatttggggaatatattttctgttgagtcctatactagtaagattttcaacacaaggtgactctcagcctcaccttgtaggaagagagctgagaaaatatttcacctgctctttctccataaggagcttggtgctgatcattgttattttcttattcgatccgtaaagataacaaagacaaatgcttagtatttcatttttccttaaatgattcttaatgacttgcagtttttaaaaacttgctctgagagtaaaccaaattacccactaaacagtgttttcacaccgaagatgtgtaagagcatacctgttgtaaggaattataattttaaaatcgttctaaagaagcaccttggtttctaaggtgatttatactgaacaagcagttcaaacaaagtagacagtgaagagaaatggctatcagtcatgtatggctcaacaggcaaaacttgctgccttctaaaatggctctacttgtaagattctgaagattccattagaaatacttgtatttaaagggtaataatgtgggaaaatgaatatgttgatttgcttgattataggaaccacttcaatagaaataattatatcaaaacatcatgttgtactccttaatgtaggttaagaaaactaaaatgaacaaaaaaaaatctaggaatacttgtgtttagtaaaccagttttagatttcacccttgtacatttcacccattatctaggaccaattaaacatttggcactgaggaataattcagagcaacaactcctaggggagaactagattgtctggttggtgatcaaaaagaactaaagcatctctgaaggcaattagctctcaacactgtgaccaaggccctggaggtggggcatgttctttctgccttccacacaccccttcaggctgaacaaggtgttattttttaactgctttgtgaattacacttctttaaattcctgtgataattattccctatttcacaaggatgcctttctgtaacatcttgaatatgttacacaaatagtctttcttgaggcaccctctgatgataatactaaagatcacaatcaaaaatgattgtgcccagagtagcagtaccactttgcatttaggttgtgatctactgaaaaataaattaaacacattaatatttctatttagggaaattctgacaagtaattttataacaggatcacttcattaattataaagcttcaaaatacttaataaaaaactaacagatcaggttaattacatgagacttttcaggggaaaaagccatacaaaaacaaacaaaaaaaaaatgagaggagagacaaaaactatctttgactaacattttaaaggtaagattatttactaacattatttttcaaaattacattgtcaaattagcattcacttcctagtaatatcctgaagccatctcactaaaaattatgcttttgaaacaaattaacgagcttaattcattttctatgagtgtatgtttggacttgcttcgttaatttttttgacatggaattgttagctttcaatgctgctgcaaaggcttccttatattcttctaactcagttgtaacctcttcataagcagtttacattttgtagaatttacattccacatctttaagtgtgagttccttcttatttagtgaagccatattatccttgtttaactgctctaattgttttttatattgtgcttgtaactaaaacaaaggaaaagaatacacttttaaaacaattataacctaattattgtatgtttgttgcctttcattttgagtcagtgattcaaagagcaattttgaatatgttaaaaaagaggctgaagcttaaaatatttcagcaatatcaaaactaataactgaattcacaattaagtctgatttataaaaatttgaaatcataattatgttagtattcatgtaatctggtcatataaaaagtaatagaatcctttcataattttaaaaagtgattaatgaacaatgtagcttaagaccaattcaaaagtgtcacataatttctaaatcacaattttttcctatgccaactggccttaatcatcaaatgactccataatgagaatcattactctgaaagattgattttcttataataataatggaaatttaaatatttaaaagaaaaaacagatgccattttttttctagaactctacaaagcagattgctacaagagaggcagaggaaacactatatatatatatacatatatatatgtatatatatatacatatatatacatatatatatgtatatatatatatgtgtgtgtgtgtatatatatatatatatatatatatctccaaaatataatttacagtgaaataaatgaaagtacattacaggtaaacttacctgatttaaacaactaacctgtaaatggatttcttctaatttttctactgcctgtattgccctttcatctggctctgatttatattcttgtagtttactaagttctaccatattgttttccatatgtgtcttaagatttaatatttcttcttccaacatctttttatcctcctcaagtttttcacattcttgttgtacttttttcatagataataactcctgttgaataacttgattgtctttagccaaattgacgcattttgaagatacagcttcctcctctggcgtaagatcatcaaactgcatgaataaaatagtatagcttgataatgaagtaggctgagaataatctaatacaaaaccaatagcaaattttaaaatgcattcacttgtaataaaatgttatcagtaatgcatcagattcttcaaatgtgaacccttaaattactcagaattttaagaacaaagttaaagctaccatgagtcacaaaaatatattctttagtatcatcatctttgccacagaacttttgtacttcatcttacttttatttttctgataatttatttttgttcctccttaaatggcacaaagttatctcctagtaaaaagtgtctaacccccttccttcattatcattccccacaatatttcaaaaaaagtttcagagatatcatattgagttatttaggccaaagtcaataaatggctctaggaataagactttgaaaataatattacactctatactaggcatggtggctcatgcctgtaatcctagcactttaaaaagctgtggcagaaagatcacttgaggccaggaatttgagatcagccagagcaacatagtgagacccccatctctacaaaattttttttttaattagccgggtatggtggctcatgcctgtagacccagctagttgggatactgaggcaaaaggatggtttgtacccagagttcagggctgcagtgaattattatcactgcacttctgcctggatgacagagaaagaccctatctaaaaaaaacacaaaataacaattctataattaaggattctgatgccataagcctttccttaaactgcaaatgtttcatgctaatttgaattgcattttaagaagtaatgattcttggggtaaaggccataggatacagcactcagaaataaatccacatatttccagccaactgattttggatgaacatgccaagaacatatgctggagaaaggacagcctcttcaaatgaatggcactgggaaaactaaatatccatatggagaagaatgatactagcttcctatgcaacaccatataacaacataaactcagaattgattgaagattgaactgtaaggtccaaaattatcaaactactataagtaaatatagggaaaatgcttgaggacattagtctgcacaaagatttttatgggtaagacatcagaagcataggcaaacaacaaatgatagacaaatggtactacattaagctaaagagcttctgtcaggcaaacaactgagtgaagagaaaacctgtagaatgggagaaaatattgtcaagctattcctctaataagacactaatatacaaaatatacaaaaaactcaaacaacttcacagtaaaaaaaaaaaatctgagtttaaaattgggcaacatatctaaccatacttttttagaaaaagaaatacaaatagccaataaataatttttaaaatgctcagtatcactaatcctcagggaaatataaatcaaatctacaatgtgatataatcttgcttcaatttgaataaattgctatcattgaaaagacaaaaaaaaaaataacaaatgctggtgaggctccagagaacagtaaactcttacatgctgttggtgggaaggtaaattagtgcagccactatagaaaacaacatgaggttttctcaaaaaactaataatgggactgctgagggatccagcaaccccactactgggtattcaggaaatagaaaagaaaacaatagatcaaaaggatacctgtcctcatatgtttactgtagcactattcacaacagcttatgtatggaatcaacttacatgtccatcaccaaatgaatggatgaaaaactgtggcacacaaacacaatggaatactattcactatataaaggaattaaatcctgttattcgtggccacgtggatcagtctgagggatgttttgttaagttcagacacagaaagataaatactgcacattcttactcatgtgtgggagctaaaggaaaattgagggatgggcaatatggctgatgcctgtaatttcctagcactttgtaagaccaaggcaggagaatcatttgaggccaaaagttccagagcaccctgggcaacatagggaaatatctctacaaagtaaaaaatcagacaggtgcaatggggcatgtccataatcccagctgctcaggaggctgaggtgtgaggatcacgtgagcccaagagtttgaggctgcagtgaactatgataaaaccactgtctccagtctgggtgactacagttgcccagagcccagactacactagcaagaccctgtctcttaacaacaaaaaaaaactcatagaactaggggaggggaggctggttaatggatacagaattacagttagataagaggaatgagttctggtgttctgtgtcattgtagggtgaatatggttaactatgacttattgtatatttttaaaaatgccaaaagattttgaatgttcacaattgaaagaaatgaaaaatggttgaagtagtaaatgtgctagttagcttgatcattacacactatatacatgtataaaaatatcaccctatagcccatatttatgtatatatgtgtcaattaaaacaaaagagaagctacattcatcccatttaaaacaaagaatatgggccagccttactgacttccttctaatgagtagaatgtagagaaagggataccatgtggcttccctatatcagactgttttcccttggaacccagccccaattgtgagagccattaggccacaaagagagcctgaaagtgcctgtgtcagtgttcatgctgcctgtcccaaccaagtttacagccgatggccagcatcaaccatcaaacacgtgggagagcaaagcttcagaggattccatttccccaactgatcagctgttcctagggaagctgaagggagcagagacaagctgtcctggccaagtttttcccaaaccacaggttcatgaacaaaataaatgtttttctttcaagccacaaaactctgggtaattgttaggaaaataagttttaaaaagagacaacaggaaacataacttatgcagcagaaaagagtctcctttaaagcaggatctaataaatgttgatatgtatttattgatgtcaaacattattgagaagcagcagataaccaggagagagacataagctgctgaggaggaattttcctaaaactccttcaattatgagctctgataacaaggcaagggtgtctctttacaatttcccctcaagttaggaaataagactgggaagcaagaagatgtatgatttgaaaaacaattagaaatacttggtgacatagccaaaatcagacatttacctgatttcaattaactaaaattctaaaagaagaagatttgagtgtttattaatcaacctagtattcaattttcattttcttttctaaatgaggaaataaggagaatattatggaatgatttttagtcttcacagaagtaaaataagcatagtgtgttttgagtgttaagacatcaaatgcaatttctcctttaccttactccaagcttgtttgtatggagaagtaaagaccatcccatctctatgctatgccacaatgcttctctatagcacacaacttggctctgaaattttgaaagtcaaaatactaatctactatgtgtctctgataaattgcctgaacattacctgattttgaagtgctgcactcctaagaccttttcttggaatgagttaaactttttattccaagaatcctctactgagctagaaagcagagctgtgcatctctgtttcagtaaaaggaggtcaatacagggaactgtggtttctgagaatgcaagatctgcactaagaaaaggattagccacagtgttacccaagagaaccagctaccaggaggaaagagggtctgtaaactgcaagatgattacttcacttgatttccactgaggaaagctggtggttcagacttaaacttctccttcctagatggtaaacatctatggaaggttctatgaattataatgagttagtaaaacataatgcactaatattagactatgtcagcagatcctgtgaccaaaacttactgaaaatataactatagtgggaggcaatggaaaagagactaaaggtttaaatggagaaaaaagaaattaagtgtgccttgtaagcctggcttctgatcatgtcttagaagaagtaaggtataagctggccagagactcctttgtgacacaaaaggtgaagttaaagatattccactaaatttaatttttattatgacataagacaactggtaatatgcaacatgattgaaaaaaacttctcattcaattcgattgggccttgacataagaatagacataaacaagctaagaactgataatctaaaaataaacctgcacatttacagtcaattgcttttatacaagcttaacaaaagaacaaaatgggaaaagaatagtcttttcaacaaatgatgctgggacaactgggtatccatatgcaaaaaataaataaaatttgaccaaatatcttatttagaaattaactcaaaataaaacagttaactgtaacagctaaaactataaaaccctcagaagaaaacactggcataaatctttgtgactgcatttggcagtgttttcttagctatgactccaaaggaaaaatgcattcaatggacttcaaaattgaaaactgctgtgcctgagaagacagtatcaagaagtgaaaaggtaagacgccaagtagaagaaagtatttgaaaagcgtatatctgataaaggacttacatatataggaaatataaataactcttgcaattaataaacaataagataacccaattttaaaaaatgggcaaagattttgaatagatatatctgcaaagaagatataaagatggataagcacattaatagatgcttaacgtaattagtcattaggaaaatgtaaatcaaaaccacatgtggcatcacttcacatcacaggataaaatctttgttcaagaaaaaagagtaagtgttaggaaaaatgtaaagaaattaaaactcttatttaatgctgctgggaatgtaaaatgacacagccactttggaaaacaaactggcagctccttaaaaggttaagcatgaagttaccatatgacccagaaattccagtcataagtatatactccagaaaaataaaaacatacacaagcacagaaactcatacaaaaatgtttacagcagcattattcataggagtcaaaaagtagaatgaaccggaacgtctatcacctttgggtgggagagaacccaaaggtccatcacctggccaatggataaataaaatgtttgatgtatccatacaatggaatattactcagcaataagaagaaattaagtacagatactgtattaggaggagacagcaaaattcctaggcagatacggaagggtccccagagaatctcccaccagccccacaagtgtttacaccagatgttatgtgcagataagagaacctggacttgtcttgcctggacatgcctgcagcagaccggaggcccacatgtactggggggatggggtggagtcaccaggaattcacgccttatgcagaggaggaacctggccgcttcagctcatgtgctcctggtattcaattgtgaggtggaaacctgtttgcaggacccctctctttgctgagagctttcctttcacataataaattttgtcctcctcaatgtgtctgcgtgcttaatttttcctggtcatgagagaagaacccagatgtagctgaaccaaggagcaaaagcccggcatcaatacctgctacagcacagatgtagcatggaaaattatgctcagtgaaataagccagtcccagcagaccacttgcttttcatttcagaggcttataggcaaatctatacaaagaaggtgagtggttccctagggctgagggaggaagggaaaactagtgaagatggttaaatgatgtggggtttgtttttagggtgatgaaaatgttcaaaattgattgtaatgatgactgcataactctctgaaaatactaaagttaatgaattgtatattttaaatgagtgaattgcacagtgtgttcattatttctcaataaacctgttgccccctaccccaaattaatttggtactagtgattttggtactagtgatctggagacaggtactgcttggtttcagatcactggccagggttcaaggcctaagagaatcaacagcatgtcctctatagaaaaagagatttatattttaaaagctatccttttcattagtatcaagcctgtaaaattaaatgaaaaatctttctttcactgcttaaagcactgacagacttatattgaggaataagaccttgttctctttggtcccaatttctatctaaagggtctcatcagatgggttgtattaactcttataatgtggcttcctttctaacttgattctggtgcagcatcacagagagaagaagctgaaagaaatcaaagtattttacccctaaatatattttttgacatattttgaaatagctgctgcagggccaagagattgaaatggctctcactaatgtagcccaatctctccccttctagatcttcctagatctggggaagattaactaagagcctgaggcatttaaagtctgaaaaaatatatttaccttctattttctccacatattttggcagaatttgggtttttccattatcaatattttccaaaattacgtgatttttaataccaaaactgatttaaaattaccatacgttggaatataaattattctactataaagatacatgcatttgtatgttcattgcagcactattcacaatagtacagacgtggaatcaacccagatgtccatcagtgatagatgggataaagaaaatgtggtatatatacaccatggaatactatggagccataaaaatgaatgagatcatgctctttgcagggatatggatgaacccaaagctgatatcttcagcaaactaatgcaggaagaaaaaaccaaacactgcatcttctcacttataagtgggagctgaatgatgagaacatgtggactcggggaggggaacaacaaacactggagcctgttggggtcaggagggagagcatcaagataagtaactaatgcctgaagggcttaaaatctagatgatggattaatgggtgcagcaaaccatcatggcacacgtttacctatataacaaacctgcacgtctcacacatgtaatctagaccttaagatttttaaaaaaaaactaccttctgttttagcttcttaatcagaatatccatttttagttgatctgtttttaagtcttcatggcaaacaaagtcttcatttccaaatacatttaacatatttattgtcatttccaggagtttcttatatctgcagaaatatacagaattagtaagtcaagtatttttaagagtaaatatttaataattgtttaaacatatattatgttatggcatatcaaagaaacaaatctataaactatgttcctttcagtttcaactgaacatagttttaaagcattctatatgaaattataatcttagataaataatatgaagaacaattttatgacataaatggcagataaagtgatattataaccatacagtgtttttgttttgttttgttttgagatggaatttcactcttgttgcccaggccgaagtgcaatggtgtgatctcagctcactacaacttctgcctcctggattcaagtgattcacctgtctcagcctcccaagtaactgggattacaggtgtgtaccaccacgcctggattattttgtatttttagtagagatagggtttcactggtcagactggtgttgaactcttgacctcaaatgatccacccactttggcctcccaaagtgctgggattacaggtgtgagccaccacacctggcctaaccatacactttttgtaaataaactactcaagtccatgttggtatgctaggtaaaataacctattactaaatataagccataacccagagatgagtaaccaagataaaaaagtaaaacacatacatttgaaaaagacacaaaaatacattttgatgcccattggccacagtctctcagaagaagaaaaagtacacacaaaaagcctcaaggagatcattcaatgtagaaaaagagaagaaaacatctttaatatctgagttgaggagaaaaaggaaacaggcagttttagaaaaaaggaaaggggcagagagatgtgagacgatttaaagactttgaagaagagatctagacacctttgctgacataatgtcaacaaaatgaaagagatacaaaaccatgtagagaaaggcaatgacagaaaaatgttgattagaatcagaaaaccaaattaagtgctcagtaaatacatagaaaagtagctgtgttcagggcttcaaagacagattccattgttttaaaaaaaatctgtgatcaaagcatgaatgttcattttactttttcttcaagttatacatatatttttatatatatgaaatttatttatgtaaaacaagtttaataacatgtatacttcatgtatacaacagaggtactcatgtacaatgagtaaatttccatgatatgttttatatctaaaagaaaaagaagcagaaacaaaatataagctacatatcaagataaatttgttgttaaagaatgacacaaacaggtcttctttgaagaatttgaatgcagcagaggatactacaaaagaaagaaaaaatgaccacagacagcaaaaaacatcttcagaaataaaaattcaaactagataatgaagagtgtactggacattatatgtccaaggcttggtcattgttctcaaaatcattaaagaataagtggccaggcatggtggctcacgtcactttgggaggccgaggtgggcagatctcgaggccaggaatttgagaccagcctgaccaacttggcaaaaccccgcctctactaaaaatacaaaaattagccgggcctggtggcacatgcctgtaatgacagatactcaggaggctgaggcaggaaaattgcttggaggcataggttgcagtgagccaagaccgtgccattgcactccagcctgggaaacagagccagactctttctcaaaaaaaaaaaaaaaaaaaaaaaaaaaaaaaaaaaaagaatattttggcattcaaaaaaaatttcaccttgccccagcagctcagctgactcccaaccccatgacacaaatgtctaaaaagttgtgctgtgagtttctgaaatacattttaaaatagaattcatttaattatgaaaatgcaaacataaaatgaatttgtatctatgttttagtcaagtaaaattagagctaaatcaattaataagtggttaacatgttctagaatatgaaaaccatacccagttgcctcttcttctaattcatgatttttctttcttattcgatccacattatactccagtgatgatattaactcaaaaagttttcttaattcttcatttttttcttcaggcttaaaaaaagtgtttaaaattatttttgtaaaatctagagtccctcttttatctcaaaaatattatttctcataagtggatgagtaatatgtatataggcaggtgtataaagtgcattttataaacctgatgccaataagggcagatttcaaaaatagtcacttttcttaaaactgctaaaaatgattcaaattttcatcatcttttctgaaatttaaactgccaaaaatgtttgttacaaatgagggtttttacacacaaaatactaagggttagtaaaaaaaaaaaaaaagagtagttatatttacattttagtttttaaagatgctctataaacattgtctttaatagtttaagatattccaagttttcttaaattacatcttactaagacaatttttagaaaactcttatctagttcccattacatttttgatcctcatctgtcttcaggctgagctaaatactgtcattctaagtattcacccataggtttcagtttttccctttctcttaaccatttctctttaaataaagtttattttttctataatcaacaaaaacaacttttgtctactttttgtggcttttctattatcctgtttctccccttccattggactctatgacacatggtctcattcagaaatctatttttcatcacttattgtgttttttatactgaaatctgatttttaataattccaataaaaaagcccaagggtcatgaaggactttatcctgttttgctcagcagagcagtgaccaaatgctccctctgctcctctgacccctcttcctttctaaatgctgtgacctctattcttcagccctaaccctttctattcctctgaccccacttcctttctaaatgcagcaatctctgttcttcagccctatccttttctattcctctgaccccgatcatttctaaatttagcaacctcgttccacagccctatccttttctggttttttggtttgagatggagtctcccactgtcacccaggctggagtgcagtggcatgatctcagattgccgcaacctccacctcgtgggttcaagctattctcctgcctcagcatcccaagtagctaggattacaagcatgtgctacccgcccagctaattttttgtatttttagtagagacgtggtttcactgtgttggccagactggtcttgaactcctgacctcatgatctgcctgccttagcctcccaaagtgctggggttacaggtctgaccaccatgcccagtggctatttcactttttacattctctcaggactcctaaaatctcaaaactttgacctagattccctaatctatatttccagctctgaacttcttcttgaggtctcttccttctagtacacatattatagacaatgttctcaaccacacgctcatacattgctacttggtgcagattacttttgtagatagtgaatcttgtctattttatgttggctctcattaatgttactttgttattttctaatctcaaagggggactatctcactgttatgatactaaccagcatactttgtcctttttttctttctttcttcttttttggaccagtatactttgtcccttttttgttttacatttttaattttttttttttttttgagacggagtcacactgtgtcatgcaggctggagtgcagtgacaccatctcggcttactataatttccacctcctgggttcaagtgattctcctgcctcggcctcccaagtaactgggactacaggtgcacaccatcacacctggctaatttttgtattttcagtagagacagagtttcaccatgttggccaggctgtttttgaaatgctgacctcaggtaatccacccacctcagcctcccaaagtgttgggattacagacatgagccatggtagccagccctctttttcttttatattgaaaactttcccatgtgaatcagattatcaattgtttgcctttgttttcttttaaagaaattccttttccatagagatatggcatgatgaaaggtttgttctaaagtttcttttgggggacatttaactatgtcattgggaagcttcagtaagtagagatctcccttcttcccactcaagattcttcatctcaaaatggtgtccaccaaatgtcttaatccaggttgtctcttgtttagaaattcatgaaataggaaccttctcgagaagttggaggctattgattgagatggttaaagctgccccttattatatgttttactccgaaggtagacatcaaagtggctaataattctatgtctgatgtctaactcacttctatgggaatctatacaaaacgttttatttatgagacagagtctccctctgttacccaggctcgagtgcagtggcttgatcaccgttcactgcagcctgaatattccaagctcaaacgaccctcctaccacagcctcccaatgtagctgggactacaggcatgcagcaccatgcctcagctaagtgtttaaaaaaaaatttttttttagagacagggtctcactatattgctccgcctggtctcaaactcctggactcaagcgatcctcctgcctcagccttccaaatccaggtgtttaactggagactaacatgaagcacttagaagactatgtggaacatagtgagctacataaaatatttgctattagcataataattttattgtatatcttaacaaaattgtgtattgtaggcaggtggcatgccaatggaagtactctcctatagctgaactgaatcattcttaccactgagagttgcagcaaatgggggacataatttataacttacttttctctctgtatgattcattagtcaatgactatgtatgtactacaatgtaaacagcacctcctggattgaatagtacataactgacatgaccagcaaagacagactaaagacactgagctgaaaaccctggactctattgctaaatcaaggctcctgaatccgttaactctgagcaactgttgctgtggtgctgccttcacaagcactctgctgagcactcagattgaggggctgtgctatccgtcatcagagaagctacagccagaactgttcagctgacaaactggtaacagtccagaaatacagttctgactgcatagtgaaaaaacgccaatttagattctttttcatagagagaaaaacataaacacgtgattgaatgcatctcctgtattagactaattggtttagatttgatatttaattgctaaaaatacatttagaatataaactttactgtgtcaaggtctcaaagcagaaacaattcgtatggcataaaggattgaattgaatgctgcaaacttctaagctaaaatattttcaatgtatgcaaggataggtggcatacatattatatattattcccccattaagcaaatttataatgagagaaaattatcttccataaaaaaataaaagccatgtaaaattaaggattaagtttttctgcacagactagacaacgattgctaacgcataaagtcaatgagagaacactcagagaaagcttcatgaaaacaataaattgtctgccacgtctgaatgaatgaggctagatgaacagagactgagaaggcagaaaggatagcataagcaagacaagtgctgatatctgcccaattaactctgaggataaagtccaatggcagggaaataaaaacccgtgtccacataataacctgtaagtgaatgtttgcagcagcatttttcataatagctaaaaagtggaaactaacctaaaggtccatcaatcgatgaatgaatggaaaaccagtatagccatggaatagaatatcatttaactataagaagaaataaactaccaaagtgtgctaaaacagacatgaattctgaaaacattatgctaagtgaaaaagccagtcacaaaggactaaatattgtataactctatgtatatgaaatatgccaaacaggcaaacatatggagacaaaagtagatagatggtggttgcctacaacaggggtaggtggagggacatggaggaaggctgcagtcatgcctaggagatgtggggttgctttccagggtgatgaaaatgctgtgaatatactaatagatactgagttgtacattttaaatggttgaactctctgaaatgtgaatgttatctcagtgaaactgtttttaaaatccaaaggcaggatcaagataattttctcaactctcaatttttgatgtacatgctatctcaaatttaaatatttctacagttttatagtatattttaaataaaagacaaagaaaatgcctaacttttcaaatagtttgtaaattaacctaaaacatgcacatttcaaagaatagtataatggcctttctgtacaagttaacctagaatctgtgaaataaatagacacagattctgtgtccattcacaaaagtgaagaaataagacaattttctggaacattccatgaaacattctcctctgatttaatctggcctgcctcatccgagaaatacaaaaattacttaaaaatactgttttaacaggaaaaaagtcagttttctatgaggaatgatgtataattctcaacttttccaagggtacatattgtaagagaaaacgtatgtaatggtttttcaaaatggtagaatgaaagtcacaatataaaaaaaataagtacattataaagatagtaaaatggaaataattcattgtaatgaaaataaaaaatcaagcttctgccaaaattagtatcctaaaacatgttatataattcaactagctacagaatacagttgacatgttaagctccatacatactgactttccacttgaaataatttcttctttggggcctgtatctcatccaaattaatgtgataatgtgatataccttccagtggagactctaacatagttaatttttttaagctgtcagccgcttcttgttgaagttgtctcacaaccacctgagaaaatatttttgttactaattttataaattgccttattattaaattatgttaataatatttaactctaacatacctactttgaaaattatcaccacacatatcaattcaccttcttttaatcacatgtacacattttttatttattactgaattcagtgagggatgcagaatatgttttcttcctgccaaattggtattctcttacttacacaacagattcatcccaccattcaatcatcttagaagctcaactcaacctcaaagttcctaacatattcaatcacctgttcaaatccttccaacagattcctatctcagaataaaagtaaaattccaatggcctttgagatcctaggtaaacaggcctttacctccctctctgacttcagagctcctacaactccctcctgtgattactccattcccactgtacgtgaagcctgccacccctcagtctgaacatagggatctaatgcctaactcataaatcacaggcagctacaagtatctttctactgaacaaaattatattccaatgatagtcattgagccttgaaataaaaattatcagctaattattaatataaatattcaaagtaaactataaataccagtgggaagactaaaccaaatatagattttctaaatattaccacatgtatcctaaattatgattttataacaagtaggtgcctttaaaatattacatagtcataaaaatatgtaatttgacatattttcagatttgttaaattaatatgaataataacaaagatataccaactaaaatacataaaaagctacttaaagcaaggtattacaagacacagcaatacacttcagttcatctgggaaatctagaattaagtgtcgaagaaaatcaattaaattttaatttgaaaatactcatttcaggtgtaaacatttccatttatacctatattatggtcttaacatgtggcaacataaagtcattaaaattattatttcagcagtacagaactatctaccttaaaatatgactttgtgcctaataaaatttcataggtgacacaatgtcttttctcaaagtaaatcatctctcacctctaccttttatttcctagaaatgaggcatgtttctaagatggcatagtaaacacatttttcctttttttattaaaacagctttgttgaaatataatttacatactatagaatgtatctgttttaacttaaagttaaaagatttttagtacatttactgagttgtgcagccatctctacaatccaactttagagaatttccatcactgcaagatccctcacgcccattagcagtcactaccagcttccagccccagccctctacaaacattaatctactttttgtccctatacatttatcttttctggatgcttcatgtaaatggaattatacagtatggtaaacacacttttatccattgatttttatattccactaagttcaacatgtatccagaaccaaatgtttaaattttctttctagaagtttgaaaatatttatcttccttgatacttactactctttctgctttctctctctcatattgaaagagactttcttttaaatgatcacattcattcattagcttcttatttttctcttctagcatgaggtctgtctttccactctcaataaagcctctttggatattagttactatctctttatgatcctttttctgatgaacatcatctagttgctgttcaatgcatggatttttatattggagttgacatatcctgtcttctacagagccccactttccagtggaattactcactttagcttctgcattttgatacatctctttcatttcctttatttgctgctgtgtttggcttaggtcgttttggacagtttctaaagccaatgacttttttctgagagtatctcttgtcttacggaacttatcttttaaggtattgaatttaatttgtgttttagaaagttgttcagtaagaaactcattcttatcttctactttgggaatatcagaactcatttttacttgtacggaaacatctcgtgttcactctaaagcaagttttaggtttctttctgttttcacactttcactatgtttacttatagcagcagccagtctagactgataagattcaatttcagcttccagtcttttgttgctttcttcttccttcaacagtttggaattgagccttgtattctcagctttgagatcattaagctcttgttgataccggaatgctgtttttgttatcaattcctcattgagttttatatagttttcaagggcagcatttgttttttttaacaattttaacgtccttaagatatttattttctttttccaggttgtcatttttcattgtgcatatttcctgtctgagtatagcaatatctgccttcaaaatgcaattttcatccatcagatcttttatttcttcgtgattatgaaaatcctaaataaaacaaaagaaacttttagctagtactcaataaaataacatatcatgattacctctgaagttaaagaataacctgcgcatccatacactaaaaaggttactgtaagtggatgtccaactagagaaaaagttgaagcaaaactttgaaccctatagagcataaattccaaaaagtttagaaatttatttaaaagtcaatgaatttataaaagtaaacacgtatacacacatgcacaccagagaacttttaagaatttcagaattggaaaagcctttcccggaattacaacaaactcaaaagcataaattaaagcattaacaaatttgactaaattaaaatatatcaaaaaattgcatttaccctttgatatctaactcatacaccatcctatagtaagaaccttagttcacacgtatttggacagataaaatttcccagagttattacagttctgtttcactgataacattctatttcaatttgactcttttaacacttttatactcagttgtaagaattacatttactaaatcataaatctagacattatactagtcactcctatatacattcattgatgaactcatctagttaccacaattttgaaaagaaatgttgaaaatataagcaagctacagaattttccccaggacttctgactctacttctagttctctgacagatcacagttacttctgtggtgtaaatatatcaatacgaaagaaaacttttatttcaaaacaccagtggtaaataagataaaatttatagagctcttcttagaatatcatgagattatttgtgattgcaataatttgtttcctctttataatattaggtacagtaatcaatatgaaatagggagaagtacaaggaacaattttactgggaacaaaatctttatcaataggttatcactaagtatatattatggcataatattgttttcaaaagctctttgtaataaaataataacctacatggatgccaagatttataataaatattaataattgtacctgtaactgtcatcattcatttttttaaaaatgagataacatttctggtttgttttagacctaaatattacatattaaatcaagaggatattataagtaacattgataaaataaagtttaaaatatagaatttttaccaaagattgatttatctgatttggagtatttcttgcagtcttcggtttcatctctagtgattgaacagctggttcaagttgttttgcttcaacttctttcttatattgtttctctttcctttctaattcttctctattttttgtacagcatattaacatttgtcttttcttcattttcttgtcttaagatgcagctacagataaagacatttatctgaaaattcattttgttaaaaaataaagagatcatcctgtgatctacctctgcagatgctctttatcatcctaataaaatttctatattctggattatttttcctttgtagttctcagatatttaatttctcacttcaacatcttcaaaagaatgcatatacttgaaaagtagtaaggaaagaatattctgctaaagtttttgttactagtcactctagtaagtattataaaaaaggatactggaaataattcagtatagttagaagttcaaaattaccttttcaaatcacacagtcataattactccctgattagaaaaggtcatttacaatcaactaaatttttaaagttactatttattgacaagcatataagttcactagaaataaatttttatctctatgaaatattgcgggtgtctctccaaatgatttacagagtaagatgtctctcacacaaactatatttgcagatgattgtcatctaaaactaggttaaagagtctaacatctgtttccccacactttttataattctttcttaatacttccaattcaccttcttattacatatattttatatatttattaagctattgttcattatgtgtaatatataattaatgcccttaatgtgtgtatgtttacacaagttatgttttcctgtgaaatctagtcccagaagtggagttgttgagttaaagggatgtcaggttatttgaaattttgatacacagcactaagttacccttcagaaataatttaccaatttcatatatgaacagtgtatgagaatgcctttttcctcacattttcaatggtagtaattactttttcaatatcagcatgactttactaaatatatcttattttatattaatttgcatttttctgattaccaggcagggctaaatatccctggtaaaactgtaaaacttgttaatcataaggaacattagtccaattttgaattagtttatagcacaatgacaattatctgctgagaaatactgctatcggtggctgggcacggtggctcactcctgtaaacctagctctttgggaggccgaggtgggcagaacacctaaggtcaggagttagagacaagcctggataacatggtgaaacctcatttccactaaaaatacaaaaaattagccaggcatggtggcacatggctgtaatctcagctactagggaggctgagtcaggagactcacttgaacccagtatgcataggttgcagtgaggtgagaacacaccattacactccagcttgggcaacaagagagaaactccatctcaaaaaaaaaaaaaaaaaaaacacactgctataggcttactcacctatcgtgctcttccttcagtttcttgggaaattgctgaggatacgttttcccaatctttctttgtttggttaatctgtcagcaacagcagaagatgtactatgatgtacattttctgatacttgtattttttcacttttgtttgtattatttccttctttgacctctaataaaagtaatatgaataataattgttattatttcattcaataaaaaactttttccctgattttttcacttgattcaggttaactatcaccattttaatgataaaagtattttgtgcttactttaattttatcattatacataattattataattataatatactcatcattttatcattgaaatttttgtcaagtcttctcatttctgtttgtgtgaatggaagaattttccaaaatttcaaaaagagctcttctccattttgtgtttttattcccatccactctttgctatctgatataagtgtttatgctatctgactggcagaaacagagaaataaaaaaacacaggcataacatatatcttctgtcattgccacctggattttacatgaaatagccagattaagaggatgtgatcttgtagggcttcaggaacagtaaagaagttttcccttttctgcactgagctattcttttccccactgccttttatctctctttttttttttgaatcctgtgatatcaaaaaagtgaaacttctccctgaactatgggaaccaaagtttgccacaacagaagaagcagagtgaaactgctgagtttctagtgcagaattctggaaaacgagatgcttcccagatttcacattcaattaccacaaacgtttataggtggaaaacatacggcacagttatctactttagtcccattatctattgaaaatgggagtcaaaccaaccaagacatatgaaacgtttcatccagagctcttgaggtggcattctctagcatttcatggcaccaaataacatgatacaattccatattgctgaatgacataaattaccagataaatttatcaaattagtcagatatattaaaagtctaacttgagcaaagcaatttaacgcctcagagggtggaaaaaggcctcatctgcttttattttgaaagaagaaaatctctagatttttgtctatctttagaacacaatgtacagaactcaactttctactaaagagtcaaaggctaaatttttagctaagaaattatgcttcttacatgataaaaatcatacatgccaaaacttaccatactttattaaacaacataatgcaaggtctgattcaacagaaatattggagtggtgatttttttaaatatgtggaaatatatatttgttttcaaagtattggaaataaccatgatggaactataaattcaaatagtttgagctaagcagatatacttacatgcatgaaaactcattaaacagactcatttggctgggaatattcattgcaaccctcaaggctagacgtgtttttgtggctcatctcagtcattgcttccctcccattgtatctccattttatcattaaataaatgtaattcatctctaaatgaatacagaaaaaagaatctagaatctaaagcttatttctttagcaatttctttatgttgatctggttcagaacatcacaaggtgtatggctgaattagtttcccagctcatatgccacttggaagactgagagtgagacttaggttgattaatgaacaaacattatgagaacattctccagaaccattgtttagataacaggactaatctacttagacacataattacacatttagaaaatcccactgtaactgtacacatgagattttcttgaatggaaaatttgactaaatcaaataattgataaagagaaaaaagaagcagcaagtgaacctctgtctttttgaagttggattttctttttctccaaatccaggaactctacttgtaacatgcctacctaattcttttttagtattattatactttaagttctggtacatgtgcacaatgtgcaggtttgttacatatgtatacatgagctatgttggtgaccttggaatatcttgctgtaagtcttctagctatatttttgatgttctcttactatgtggcaaagaataagccacattttataattcaagattcatgcttttgtagttattagcactgggactgtcatatagtggcttctggaataagcactgtattggttttctgattttacaagtatctatagcagcagaaatcctgtggctttgtatctgaatcatatgcttcatttctttggggtgggtaaaccacaaatcaaaaagactttctggatctctagactgaggccaatgcctaatgtctaatttccaattagtgatatttgggtttatattttttgccatttgcatgtcaaactcttaatcatctttcattccaatcataattactgggttccttacttttccagtttctgtatcataacaaaaattttcattatctgtattagaaacaagctatgtgtctggtttgttaccatttttatagtctgatttattttaatttaaatgaagcttagaagataactggtaagtgtatttcagggacctgcagtgagaatggaataaaaagacatttgacatgggcttcctctgttcaggcgctgcctggactgtcacagagttagatcctccagatgcatttttctcctcacaatcagggacatgattcatcagtttagagggcactccttttttgttcatccctctttggagttactatgtaggagctcttcctcagggcaagcagtaattttggagttttcaaaacttttaccaatattcagcttgaatttttttgtaatgaattttaaagaaagtcgtgaatatatagatagattccctttatcacaattcttacccagttctggttcttgcgattttttttttggggggggggggcaggtgcaaaatggaaaacaaatttgcttgttttgtttctcagatgtcttttctgtcagagtgcatgttttaaaattagctttaatcaagtataaacaaataaatattagaaaataattaaattttaactgtgaaacttaatctgtgtgttgctactcttaaattatgggattgtaactaaaaattgaaaaataatttgccttggcttaacataggacagaaacatgaaccagcaagctgaactatcagcgtctgtttgtactaaacttaatgcaatatgtgtaaaatctaccagaaatgaattcaaagatgataggtagtattataaaagcttcctctcttacaaagactttacctcagcataccagaaagagtgagcccctacaatgcatgtttgtttctgaagattaactagagcactaggcaaacactaaattattaagagccaaactgaacaccaataagaaagagaagcaaaattttaaattctaattcaaatgatatactatgatagtgttatgtatctagatagaatttctgcttatatccacttctaatatattttatgttccagtagtgacaaggtttggattttttaaattttagtaatatttactatgtatttatgttgaaataaagttattgtttgcaccctgacaccaaaggtcccattctgcaaggtaggattctcttaataggcaactgggttgacttttatgaccccattcactccctgaacacagacacagaagtcaactggtgaccacgaaagagaataaatctttaaactcggcactggtgaccagcaatataaaactgcaacatttgaaccactggcaacgatgactcctttaacactactttaactcagtggacattgttgttaaactgttcataatttctattccttaataatatgacccaatatttcatgttaccttctgtattatgagtaaggttatacaaataaaagagcaagataattctgaaaatttcttgcctcaattccaagggtaaagacagctatgagttattagagttagtaagaattactagaataactagtagttactagagatagtaagaatattttaagtttcataactggttaaaatgttttaaaaattaaatataaaattatgatctattggattgtaaaggtatagtctaaaaggtcatatcatttggactatgctttgttactaaagcaaaaaaaaaactaatattaaacaagaaacttaaattttcatatacctgtggttgcttcttttcacttctttcacaccttcctttctcttcctctgaagccactggtaaggcttgttctgttgacaaattcactggtttagttcaaatgaactaagaagagttagataaagactataatctttataaaaataaataaagaataacatttctttatattttgagagtttaaatgaagcttaatgtttactgaaatatttacttctgtaagaaatacttctaattatccaaaacttcaacaaatcacttggggagacactagatatcaccagattcaaaccatacaaaatctcagggtcactcacaaattgttccacccaacgtaagtgaacaaaactgttggaaacaaaacagaattttgaaatacagtcaaaatacacaatgtaacactttactatacctcataacagtatctttttaacaagatactaattgagttggcagttactaataatttgcaaaattatcattgtttatatctcaattagtgtgcaccccattttttacatcacaaatgttttcccctgctattctgaaaaatttattttcatcttttaagactcagaaagtaggcttggcataatagctcacatctgtaatcccagcactttggaaggccaaaatgggagaattgctcaaggacaagagtttaagaccagcctgggaaccataggtaaccttgactctacaaaaaattagacaggtatggtgatatgtgcctgttgtccctgctactcaagaagtttaggtgagaagatcccttgagcccaggagtttgaggttgcagtgagtctcaatcatgccattgcactccctccagggtaatagagtaagaacttgtctccaacaacagaaaaataaaaggctcagaatgctatgtgaagtattccttgattttaactatctttctccaaacaaacaggtgtctgctttgttggggtcccttagcactttgtcaatttttctagtgtcactttaccacctgaactgcacatcatgtctttacatgttgatcccctttgctgccagactgtagaggacaatcttttgaatcatgtttgtataaatagtcttaattttgctaaataattagttattgagctcctgctaggtgttaggcactggggaataaggaaggaaaataaaagctgtcagggatggctttcctaaagatcatgcatgagctgagacttagagatgaggttagccagattaagtgaggcagagggcaggaaagagtgagcacatgccaggaagcaaagagagagagagaagcctccaagagagtacgtatttctctgcagaagaggaatggtaagggggccattacaagcagctcagtaattctagagaaaaaggcagatggggaaagggctacagatggagatttgggcagaaatcactttcctttcttttcttttttgggacaaagtcttactctgtctcccagagtggagagcagtagcatgatctcggctcactgcaacccggcctcccaggttcaagtaattctcctgcctcagcatcctgagtagctgagattacaggcacgtgccactaccgcctgctaacttttgtattttattagagatggggtttcatcttgttggccaggctggtcttgaactcctgacctcaaatgattcacctgcctcagcctcccaaagtgctgggatcacagacatgagccaccgtgcccaacccagaagtcagtttctgaaatccttatataaacctttaagatgcttggacattaggtattcaggagtggttcacggatctatttgcattagggataattcactctaaatactgtgaggagcataaaattctgaggcatataaagaaatgaacaaagataaaatataaggcaatgttgcaaagatgatgcaggcctgaggagatgttttcagaaatatttaggatataggtatcagtggccattataagaatgaatttctattgaaagaataaatgtatatatctgggtccctggagaaatacactctgctcattactttacaaattttatcaaatgagaagtaaaataatatacataaactctttcagttacttgtatttactttacactttttctgtttcagttttttgggttttgtggtggttgttgtggttgttgttgttgttgttgttttttgagatggaatttcactcttcctgcccagtctgaagtgcagtggtgtgatctcagctcatggcaacctctgcctcctgggttcaagcgattctcctgcctcagcctcccaagtagctggaattacaggcatgtgccatcatgaacagctaattttgtgtttttagtagagataggtttctccatgttggtcaggctggtctcaaactcccaaccccaggttatctgcccacctcagcctcccaaagttctgggattacaggcacgagccaccgcacccagcaacatatggggatttgttttaaaagttctgtttcctggatctaccaagctcatgagaaaatagagcaaacaagtcatttgcataggtaagaaactttggatttatagcttgtcatcactactctagaagattatcattatgttttgcaaaacaaaatgttaattacagacataaggggaaaaaaattaaaactataggggtgggtgaaaaaatattgcataatttattactgttgacctcatcatatgactgattaagggcactgaatttaacttgtatgtgaagtagaccccatattagctgcagttaatcagtagaccaggtgttctagcagaattaaatttgatgctcctgtgttatctttaaatgacacagcttttctgaaaacccatactcgtagtgcatgattatccattaagaaaaggtgatgaaatatgtgaatacagctgaggagacaccacaaagcaaatgctcaatggttcccattaatattgggaaaatccacactataaaacagagagccatagacattatttaatatttggttttggaaggtatttttagtgactctgcatacagttgtacccaataattgctaaattagagacgtaaaaataaaacaaaggcacattgtgtttgagtaggaaatctgtagatatctaggtggttttcccatccagccacaaaattctaaatataatcatggtacctgcactcaaatttatgttaaataccaacctcaatgaaatcactctttcttctcattctctttgttatttatatgttgttttccttaagggaagaatagaaatgccttgctaagaaccattctgtttggttgtaggctgcataaagggagtaaacacaaagtacatttgaccaaaaaatgactattaaatgtcagaactatggtagcatgaagccaaacgaggtaatctagaataaaattttctatgcttctttcccttctttgctctctttctactctaataactgcgattcacacaggtaatgaagagtgtaattccctgatagaaacacagctccaagattaatcctttctttaactatgaagttcacgtgtccaaaatctgtggtagttgctgtctgatttttgatcactgatggtgatacagatatttatcatcaactcacaacttcccaaatctttgaaaagtcttactattgatgattcaactagtagaaacatgatgtaaaatatctgaaaataaagtttttatttattagaatgtaaataataatacaaattgtaataaggtgtaaaagttctttcttcactgaagcagtaccatgttgtcctgtaccccacaaatgcactactcccccatggtctaatgtattttaaaagtcctgtaattgctattaactcagacaagtttacttaacttgttctaagcttctcgtatttactacagtttactttcaatcactcaaccatctctgttatatatgttgttttccatgagaaatttgtttattagtaattaagattcttcagggataagaaaatatttgaataactaagtttgtgcataaacacattaaggtcaaatacccatgatattattgtgtgtttctgtgtactagagacaaaaacttcaaaaaatattttaatgaatatacgttaaattaaaaactgctttcattaaactgagataatcttccctcaatgcatgaataccttcagaattcacatagaccaaagaattgtataaaatataatagccttaaaaatcttatttgtagatggcacagtggctcccacctgtaatcccagcacattggcaagccgaggtgggcagatcacctgaggtcaggagttcgagagaagcctggccaacatggtgaaaccccatctctactaaaaatagaaaaattagcagggtatggtagcacgtgcatatagtatcagctactcgaggggctgaggcaggagaattgcttgaacccgagaggcagaggtggtaatgagccaagactgagccactgcacttcagccttcgtgacagagcaagactctgtctcaaaaacacaaacaaacaaacaaaaaacctaattgttcccatataagtctatgttcacacaagatctgaagagcacacaacaccgtgagacaggacagacatatattttaaaagttatattcctggtttctgtaaaaataaaacagttgaatttaagctttcaagacaagtcaaggaaaagagcaaaaaatgcaaaagttaaactcgaaaggtcatttccccgtcaagggctcatgatcactggacattcacaaactatagtgttcaaaacattagttctgaattttgatccgagtatccctttagtagctgtttcattcaaggatgtccaagaggtaaaataagacaatatcatttgctattttcagttttcttttctgagaacagcccagcattctttttcagagaaatgaattgtcctaacttcataggctaaaggctcatgagtcatagttctaagggcattaataaaatatagtggtgcatgcttgtattctgaacttttcaggtttaaactctcatatagtaaatgctaatagatacaaactgattaaagaaaagccctcttaatctgacattatttttatttttatttcttcatttatcagcaacaggagagtctaactaaatgtggtaaactggtatgagggaatacaatgaacagtgtaaaatgaattaaaccagagataatcacaccagtgtgggtacaagtgtaaaatataatacaaaacacaccaaagaaagtggcagaaaggtatataaagcgtataaccactcacgtaccattttaggacacaaaaaattctgcatattatttctgagcatcacaatgtagttaaagatttcaaaaaggcattgaaatgaaaaacaaccaacttatgatgttggtagcctctatgcaatcatgttttaaaaactttaacaccaaaaagtctcaaaattaccattttaaaagactgtgtctaccagttataaatgaatcattactttcgtcatttgtaatagtcaaagatgccacaaatgcacgcatacacacacctatatatacacctacacacacagtcttgctcgttagaacatctgataggcttcagatcatcagtgtaataacactagcaacaagcctctaaagttaaaacagaaactgacactttaaaaagtaaaactttcgtctaggtaaagatcagaactccaactagcacttaactcactggaaatatcttaagagtctcaaaattcactgctttgaatccctgacaagtataaaaattttatactgaaaacttcatgctattcaaaacattaaaacagaaacatctgacttaaagcttacatttttaaaatcttttttatgcttctaaatttgtttttattcaaatacggataccaacaataacatttatgtcaatgccttctgttcaatattgaacaaatagaattaggaataagaataatgtgagtacttccaatcattgaatgtacttatttccagtatcccattaaatgtacctgctctcaatgtctgtacatccttttttgtactgctcctttcacagcatgatcttccacttcagtgctaggctgaatgggttttaaaagaaaatgattcataaatcatatatattttatacaacatggagttagtgattcaaaaatatacataattaattactttcaaggaaggatgttttgcaggaggccctacaaagcaaaggggatatgtcatcaattatatgtaagtatgacagggccaaccaaacattcatgcagtgttactattgagttgaattctcaggcatggctataaaaataattacttaaggttttgagggttcttcttggcttcttgttttcattgcctaggacagcaacatgacagaaacacaatgaggaaaataggaatataggattcctaaaatgcacagtttacatttcagtagtgagattatgtttcaaatgcctatacttaaaatagaaaagcattgatataaccgtgaacacgtggactgatgaggagaaaagggaccattaaacagaggggcaaatcaaacctgagggaatcaatgtcaaagctgatggtgaatgtacagagtattttaactccacacaccagaggcattgctgccagcacagcacaaataaattccccttgtcttgtcactgaggaaatacacagttgggatgacagttcaggtgaatgtgtgattcacctctcatcaaagaaagggttctacattgatcagctaggatacacacttatgaaataacagctaatcaaactactcatttttcccatgataacatgggctactgcagcacctacatttctcctatcccctcatttggccttgagttagagctccttgatccacttatgcaaggtggtccataaaacacatcaaataaaccatgtcgaataagcttctgatatcaaaatatttatcaaaaaagaaaacactgaatgaccacagacttgctggatatgaatacatatttatatttcaaaatcagtgcagtatttattgaaaatgagaattttggttttcacagaatgaattttatgattatttctaaaattaactaagtttggtatattatcttacactgtaaaggacttttataaaacagctatcatatcaaagaactggctgtctcaaaaaaaatttgccaaagcatctatatgcaacttaatcacatcttattcactcatgtcagtgaaacttctctccctgaggcctgacagttgtcaagtaaattgagctgctgtggtttaccccaactctagcactctctcctgcctccagtactctccacagcaataacctcttttgtgagactggacatatgctgaagcaaatggaagtgagctgtctcaagtttacttggctttaactcccaagaccccagcaaatatctttctttcctccttttgtgtcctttcacaatccctcttcctttgaaaaaatgattatcagaactgtcatcctgatgcttcccttcctaactgctttttatggatgattgtgaccacttttttcatctgtattcagcagtagtatacacctgtaatctctcttttttcatctcattttccttcccctgtggatagaatcatgctcagaaataaaaggaaattaaagctttccctggattctgttattttttaaattgctctccagtggttctttttccagatttctctaaaggaaggctattcccttgctattcagagctgtgtccaaggaccagcacaaacatcacctgagtgctcatgagaaatgcagactcccatacctgctgagtcagactgtgcactttccagaagctcctcaactaattcatgacaatttgaatgccctgttctacactggtgtgcttccatattggtttaccctaattggcctttttggtctagcctcaatttctttcctattatgtccctgaatttaatactacattataagccataatgtttctaatgaacttttaatcaggcaaagcttctctaattaatttcttcccaataaatcacccaacactattcttttcaattatgttaatatgatactatcctatgaagttacaacattttctataaaaacaaattatagccatacatggctgaccatttacggtgatgttcatctatggtagataaaacacaggtctgcgtggtaaagtacctcaatccttaatgcctccccactagcgaggatgacagcaagagaaggaaaatgttactgtaattatatgacatattttggtactggaagctcactttatcttccttcctatttctaacaccctgttcttccttcttctacagatcattttgactttactaccctccattacagacatccactttttttatttatcccatgtacactctgccctcctcattctttgtttctcttttattcatttcctcttccctctctcctgacttgcctcaggtcttagagtatcttaaaatggaactcataactcagctcctttagtggtacttcaaatagaatcaactgctgacccttggttagagacaccacttatcaccatttcacttctcctttacttattatacggttagtcggacattttctttagctattaaactctatcagtgctcatattttaaaagaaacattccatcaatgacttttttttttttttgagatggagtctcactctgtcacccaggctggagtgcagtggcacgatctccactcactgcaagctccacctcccagtttcacaccatcctgctgcctcagcctcccgaggagctgggactacaggcacccgccaccatgcccggctaattttttgtgtttatagtagagatggggtttcaccatgctaaccaggatggtctcgatctcctgacctcattactggcccacctcggcctcccaaagtgctgggagtacaggcgtgagccaccacgcctggcctccatcaaatgactttttaaataaaatacggttctcaccttctccttttccattgactattctgtttcctttttcatgagaaggtccacgtaaaggctctgacactttctcggggacacactgctaaggtaatatcaagaattagtttccatttaaaattataatgagttgcatcaagagtttcttatcaatctctttttatgaaactgagtctcactctgtcaacccagggctagaatgcaggggcctgattatggctcaccgtggtctcaaactcctgacctcaagcaatcttcccacctcaacttcctgaatagctggaactacaggtgcataccatcatgccatgctaatgtttttattgttatctttgtagagacaaggcctcattatactgctcaggctggtctcaagctcctgggctcaagtcaatcttccacttctgcctcccaaagtgttgagataagcagtgtgcaccaccacacccagccctaatcaatttctttaaatcaatctcaatgttgcccaggcatggtggctcacacctgtaatctcagccctttgcaaggccaaggtgggtggattgcttgagttcaggagtttgagaccagcctgggcagcataatgagaacacatctctacacaaaaataccaaaaggagtcaggcatgatggtgtgtgcctgtagtcccagctgcttgggaagctgatgtgggaggatcacttgagcctgagaggtggatactgcagtgagccaagatcatgcccctacactgcacatggacaacagagcaagaccctgactccccaaaaatttcaatttaaaatgtgagaatgaagagagatacaaacaaaaaacaagcctaattggtcaatgaaatatcagcttaagccaagaaagaaaacaaacaacatgaagtacaataaagcacatggggaaatagatctataacagagccttcggtctttcatacccctgataatactaattaatatttatgctgtaattagttttttgtaagtacttctgtgatagcgtttcttactataagacattcaattagctaaatatggtcatctaccactacctgaaagaatattattataacagaaagagaaaactggaactttccatcaactttccacccagaaaaagaattggtcaccagaattctaaagagtaatgtatggcagacacatgaaaaaatactcatcatcactggccatcagagaaatgcaaatcgaaaccacaatgagatatcatttcacaccggttagaacagcaatcattgaaaagtcaggaaacaacaggtgctggagaggatgtggagaaataggaacacttttacactgttggtgggacggtaaactagttcaaccattgtggaagacagtgtggagattcctcaaggatcaagaattagaaataccatttgatccagccatcccattactgggtatatacccaaaggattataaatcatgctgctataaagacacatgcacacgtatgtttattgcggcactattcacaatagtaaagacttggaaccaacccaaatgtacatcaatgatagactggattaagaaaatatggcacttacacaccatggaatactatgcagcataaaaaatgatgagttcatgtcctttgtagggacatggatgaagctggaaaccatcattctgagcaaactgttgcaaggacagaaaaccaaacaccacatgttctcactcataggtgggaactgaacaatgagaacacttggacacaagatggcaaacatcacacaccagggcctctcatggggtgggcaggaggggagggatagcattaggagacatacctaatataaatgaccagttaatgggtgcagtacaccaacatggcacatgtatacgtatgtaagaaaccttcaccttgtgcacatgtaccctagaacttaaagtataataataataataaagagtaatgtatggcttgaaaaggtatatttaatagaacatgagttgggtctaataaaaaacttaagaaatgttaatctaaaatctcaatgttaagattccagttgaataatactagaaaatatattgtaaccctctttgctaccaatgacctatttctattttattttctttttaattatggcataatttctcaacataacatatcaaaacttatacaccctttaatattaaaaaataatacaatgtaagcaatattttaaaaacggtatttaattattagatacattaggtttattatattacttataatattccattatataaaaattcatttgtctatttattcagattaaacaactattaaagctgaatgtctcatgcctgtaaccccagcactttgagaggctgaggcgagcagaacacttgagcccaacagttaaagaccagcctgggcaacaaggcaaaaccctgtctctatgaaactcagcctagcatggagacacaggtctatggtgacatagctctattgtttcaactacttggattgctgaggtgtgaggatcacctgagcccaggaaatggagatcggagtgagccaatatctcaccagtgccctccagcccgggtgacagagtgaaaccccatcccccaaaacaacaaataaaatgcttcttacatggaagactgtattctaggtactccaggatacacacaaatatgtttactgacctccagtagcttatggtatgcaggagcttccaatgattatttaaacaactaaatagaaaactttctgacattcaaaatttcagaatatgatataaggactttgagtggttattttattttattttattttattttattttattttattttattttattttttaagatgtagtcttgctctgtcacccaggctgcagtgcaatggtgcaatcttggctcactgcaacctccacctcctgagttcaagcgattctcctgccttggcctcctgagcagctgggattacaagcatacaccatcatgtctggttaatttttgtgctttttatttttttttacagacagggtttcaccatgttggccaggttgatcttgaactcctgacctcaggtgatctacccacctcagcctccaaaagtgctgggattacaagtgtgagccaccacacctggccaagtaaatattttaaataaactacaatgacaaaattacgatgataaagtcttaccatattggtattaagagtctctgcttctagaactggttatttgcagcaaaatacatgttattcaattagatgacatgttttatataaactcttcatggacaactcaaaccacacaaaaatccctttgcaatacaaatcttgagaacataaatttaaatttctacatttccacaatttatatttttcaatcagatacaatattgcccaggctgttctcaaactcctgggttcaagcaatcttcctgcctcaaactcccaagtagcaggggctacaggggtagaccaccaaactcagctgtttttctacaatttttaatattttttagtctcactacagaaccaataatataagtagagaaacaatttctcctaaaaactatatcacaccaaaataataagtttccaagaacaaaagctatatgctatgtgctgaacatttttgccactaaaaattaccagaagattccatgattactgcaaataatttgatccactgaagatttatacaagcataaatattaagaaagtcacacttgtatgatttaaaagtcaaagtattagtatttatccatataaaccttaaccaaatttcatatttcctctactggagaaagaatttcctaatgtgattttcctgcaactacttattttccagttcatttatttttcagctcccaccctgtcacagtacttatcaatctctgttagttaccaaagttaagcacattttttgaatcaactagccatatgtatgtttttctctgagcaactttccattaccaccataaaacaattataggtgaaccactgctaaatttgaaaagtaaacacttgcaaaactacattcagagtgagaaaattaattttacaagagaccactttaccttagtagcaacactcaagtcttcatcatccaatgcaggcaataaatccacacacagttcatgcaaaatgcttgagagcaaaaatacacaatgaaaatgagcaagttgatttctttacaatttttttaactgccggtttatatccagcttccccctcaaaaaaaggaaaacataatctggggaaaggtcagtgatctatatattaaattatgattcttgatataattaaaatatgtcctctgttctaaaaatagattctatttacctacttctgtctccacctgtctaaatctataaaatattcaatgaaaactaaccttgagctttataacaaatagtgacagtcaatacattggcagagcctgacaatactttgccctcacaaattatctgttctgaagctgaacttaaaattcaatcagtggatgacataaattttgttatctaaactggaagaaaactgatgacctaaaacaagttagaaagatccactgtctctttcccatgatctgtctctggataaaagactaatctgcatcacttcacaatggcagtcttgattcctcggcatggatccaacttaggaaggtcctattgctttcctttgccctaaatcggtacaggaaagcccctacaatatttgaaatgtatgaaagccaaatgtacagaagtcaaataacaaaggtgtatgttcttattgagaatacttttcccagaaagattaaaatattaacaattataaaatcccattattttcactctataggtcctaccttattcaggtccacataaactagcaagcccttaaaaattttcataggtactcagacacccaaggagagagactgccagaaaaaaaccgagtcctcatagttgtacctctatttccctaagtattatctaagcatctttcttcctatgggctcccacttccagattccacttccacagggctccacggaagtctccaatcttcaaatcttcagtctatgaaaccacagattcctgaaaggatggcctcaaataaccaggagtaggagctctctatatccctgctcttgaaaaacaagctaactggagtctccatcacctgcccccagctatacacactaccaactacacaattgaactccatgactgatttgccagctaatcatgcccctgacccagcccacatggacatgggaaggacatcagtgaactgggaaaacaggaagaagtgaggagacacctaccctgtgccacatgtctatgtagttcagcaatttccagccccttagtactccaggggctctaagccacccttttgtaagtcaggatggaagtagatgacacctcatttgtatctgctgtagacactcctcccagtgtctcaaaatgttttaacatctttcagtaaaaatcttcaagtttgtcagtcgttgatttaaaaaaaagcagcaaactttttagagctcccttgaaccttctattttaatgtgcctttgtagataattcccaatatcttgtgtccttcatttttataatttatctttatcaaacttgtcataaaccccaatactttgatctcttatagaagagtccgtactcctatccaatccagtgctgtttatcttcaaacttggacttccccagctcattccattcttatctacttccattgtgttcaccagctaattccattctcattctatctacagactcactcccgtttgtattattaaaacacatgccaatagtatacaaaaagaagcaagagtactgggctttaacatgagttcaaatctcatttctgccaattcctatgtctaaaaaaaagcatcctaatctctttgagcttcacatcctctatctagagaatcacttgaccagagttcaacacaggtaaaaatactagaaagtattttaattcattccaagattccttaaaatcctgtaattctgtgtcctcttgattctgtctatagaaaaacttggaatacataggcagcagagtttgaaaaaataatagaacaaaagaaacaccaagaaaagcagagaagaaagttttaaaaaatgaagacaaggttatagaaaagtcatggaaaaagcaacaagactaaaaaatgtattatggaagtaagcagaaatactagcctaaatggaaaaccaaactgggaagtcaaataatttgtctctaagacttgcctaaacttgctgtggtaaaacttacagtcctatggccaaagctaagtcagatctgccctagagcctttgatggtaaaaataagatactggctaccactgaaattgtcaaatttattaggactaaccacattctagcaataaacttaaatgagagttcaaggtatttaaactctcattaacttagacattaatcagattaatgaatctgattaatctgattcagacctataacttgatccaagggctgcacagatatctatctatgctgaggagcaagagaaaggatttggaaggcaggcaggctaatggtcaaactgtaggccagctacttttttaactatgggatcatgaggcaattaatcagctctaatccatagttgtttatttaatagtaggttataggaacacagatgttatgatggctttatgagatgataaatgaatagaacatattaggatgtctagccaagaatacaacactcaatagatattggtttcttccatctatattttcttagttaacataattttttaaatctatgaaatcttacctgactgcagattcatcagaaattccaacatctattaaagaaaaaggtaaaatgcattttaaatcaacaataaatgtacagaatattaaaagcataagaatgcacagtgacgcatgcctctaatcaaaactacttgagaggatgaggcaggaggatcacttgaggagcccagaagtttgagaccaacttgggaaacatagtaagactctaccttcataaaaaaattgtgtacacttgtgtgtatgctttagatcctgttttttgttgttgttgttgttgtttttgttttggtttggtttggttttttaaagcataagactgatgctttgttacagagcattcctttgggagcatgcctgggaccttattagaattaacattcatcatacttattggtaggtaattaatgcagtaagaactcttccctttgtatttattagatgcaaagaagaatacatttattaaaacttggtatctacaagtgaactgcagtatacaagtcatcctagtcaaaccctatgagattgagtaaaaatggtattgttagcagaacaggtatgatgagtcaacagtgtcaaagagcatgatttctggaacaaaatatgaggggccattaaaacagagtatacaatagtaccccttatccactatatgcacagaaagacatacttgacaagtttttctctgctgtcacaccacagcaacaatcatcagcaaagaaggcttctgtgaccaaatgtgtggagagtttttccccaccaacaagtaagtaatcattcctgctgatgacacaattcaattctcacaccctatctacagataacatcagatttaatttaatttataaattaaagtttatcatagatatgtatgtatagggaaaaacaatttgtgattcagtactattcatggtttcatgcatccactgggggtcttggaatgtatctcccacagttaagggggagctactgcacttattttgttataacacaatacagcctctctagttcttcagttcaaactgtttagtttagaataagacacgctatcaccagaaaccagcaaaacataggactcagaccagaaacaggaatccttgcaaagactttctagccaccagcggagaagacctcaagagatatcagtgtgttactctggctaatactcttctggggaaggtgctgggtggtttccttagttgtagctatttgctctggcctacgtataacaaggcccaaattcacctgccattttacctcccacagaaagaaccactggaaagatcactcctttaagagcttatccacattcagagagaagctgaagaaacactggggaggtgtggcaggctgccgggcagtattatctgatgtgaaaaaatatatagaaagaaaactatcaatgcccttttactatcagaacgttctaatgcttgccattctccctagtaggagaaaaatatttttcacctcacataaagcaaaactcccttgtcatccctcacaacagaatctagttgtaggtgaatcatgtcatcataatacacgctgttgtcaacctcatccctcaaaggaagaggatcagtgaggaacttatgtatttacctaatagcattcactgcctggtcttatttccaatcaaagataagtatgaaagactttgtgattccagttttataaagtacaaccctttgcacttgtccccttccattgctagagagtctatctggacccacctcacagagcaagatgctccaggttgtgctgtgtggtacggcgtggtgtccttttcctcaaccctttctattatgttccacatatatatactaatcatgttttctaagtatgtaaagcatatctcatcataatataccattctttacaatgataaagaagcaaaagaaaaacaaaaggacaaagaacatcttaaatgactacattcaactgccatggagctttaattttctaactattcaaaaagatatccactcttcttattccaactatatgactcttctgaaaaaagtaaaactatgaagacagagtaaacatcaatggttgccacgagttgctagggagaaagggagagatgaaaaggcatagcatagagaatttttagggcagtgaaactgttctgtcgataatattacagtaatagatacatgtcatgtcattatacatttgtccaaattgacagaatgtacagcatcaagagtgaagcctgatgtaaactatgaaatttgagtgattataacgtgtcaatgtaagttcatcagttgtaacaaatgtaccactctctggtggaaaatactaataatgggggaggctatgcgtgtgtgggaggcatgggatatatgagaaatctctgtaccttcctctcaattttgctgtgaacctaaaactgctctaagaaataaggttattgatttaaaaaaaatattcagctgggctcagtggctcatgcctgtaatctcagcactttgggagacaaaggtgagtggatcacctgaggtcaggagttcaagaccagcctggccaacatggcaaaacctcatctctaataaaaatacaaaaattagctgggcatggtggctggcacctgtaatttcagctactcaggaggccaaggcaggagaatcgcttgagcctagaaggcagaggttgcagttaaccaagatcacaccactgcactgcagtctgggagacagagtgagactccatctcaaaaaacaaaaaagatattcactgtctatgcatcccaggatctccagaacaacaattaaaataaataagtaaaaaagatggctgggggcagtggctcatgcctgtaatcccagcactttgagaggccaaggtgggtggatcacctgaggtcaggagttcgagaccagtctgactaacatggtgaaacctcatctctactaaatacaaaaaaatagctgggcatgatgatgcatgcctgtagttccaggtacctgggaagctgaggcaggagaatcatttgaacctgggaggtggaggttgcaatgaaccaagattgtgtcattgcactgcagcctggtcaacaagagcaaaactctgtctcaaaaaaaataagtaaataaaataaaaaataaagatattcactgaacctgttactatgatatatttaagcaagacagggtgaacctaaaaattagagatcattgaagaccaaagtaacaacatgtggtcattatttctcaaattgaagtacataaaatatataaaataaataaatttaattgcatgcttaggtaagaaaatattgataaaaatgattgaatatttttatcttatttcataattctaagcagggatttatcacaatatgaaaactagattattcatgtaatcaaaataaaagacaatttttattctaattttaactcagaaaatattttgcttatttaacaattttactgaaaggtaaacgagttaaataggacagattataattacctaacattgctatggtaacttatgtacaaatagctgttcgtcactgaaagtaaaaaaagtaaccagcactgaaacttaagatggatcatacaacagaaattagtaccaagttaccttatcttataatattatgttattaaaatgaaattttaaaacaacaccaaaaattaagttggggctatacaaagtgtgcagaaaagatttcatataacaggcaagagaattccatccttagaaaggcctgcatgcaaggctggcccttggctggtgtttaggaaattggaattaggagggtttccaccattccctgagaagagtggctcactgtgtctaaagtgtttatagaaacagtgtgttttctctgaacagctgctttccttgtaagagtctggaatttgggtacatgagagggagagtaacctccatagaaaaacttgggcacttagtctctaatgagactctagtactggtagacatcgctgcacatatgttgtcaaaatgtgagcctgggagaattaagcagatcctgggaactccacaggacagaactcctggaggcttgtgcctcgtttcctccagaattgaccacatgcactttttcctctactaattttgcttgtcccttttcttgttatcaattaaagatctgagtatgactatttgctgagtcctgtgagtccttctaatgaaccaacaaacctggggtggtcttgggaaaccttgacacaaatgcattgtgtaagatttgtattaagttgacatgatatatgtaactgtaatcagatggttatttcacagaataactttccctaatctgtttttcttttcttttttgcccttgatatttgacttggagattcttgtatttctatatctatccaattgaataaaaccataaaaggaataaatgaaacaataatgtcggaaaataatgtgaaataagcagcaatcctcttttaaccgaacaaaaaatagagaatctgggtgattgacaatatgttctacaatatgaatgtttttagaaaaaaaaaatgaaaaaatagtcaattttctgcaactcaactgggctttattcctttttataataattgtgcaggccaggtgcagtggctcacacttgtaaatccgagcattttgggaggttgaggcaggaggatcacttgaacccagaagttccagaccagcctcggcaatatagtgacacctcacctattaaacaaacaaataaacaaacacccttaaaaagaaaattagccaagtgtggtagtgcatgcctgtagtcccagctacttgggaggctaaggtgaaaggatcatttaagtacaaggatgcagaagttgcagtgagccaagaaggcaccactgcatgccaatactggaaacagagggagaccctgtatcaaaaataaataaacaaataaataattgtgtatcaggccagatgtaaccacacaaaactgtagtcccagctactcaggaggatgaggtaggaggactgcttgagcccaggagttcaaggctatagtgagctatgattgcaccaatgaatagacactgtattctagcccaggcaacatagagagacccccatctcctatgataataataattgattaattgtgcatcattcaagtaaattgtataactggagaaaaacctatgactatcgagtatactattatagtctactactgaccatagagttcccgtttacttgcttctaatctttttcttcgtttcttataaaactaaaaacatgatttaaacccattaaaggcagttcattgcaaaacaagtcaaaaagtcaaaagaattgcatccaaacagtaggaagtgttatccaccgctttctgtgaacagttggacttggtccttaagaatcagcaggacttttaactttgtgtctgtgtgcacacgtgtgtgcacatgtgcgtgtgtgtatgtgtacgtatgtgaactatgacagataaaatcattttgcttgtgtaagaatatgtaatataacttgtgcttctcacaaaggaattgcttttccatcttctgtgttcagttgctatcttgaaaaaataatctcctatttgtatgggtgcccgctggttcagttctacagttcttattgccatttatttatggtaccagaaagggattgctgagttcctggttctaaacatagttactttcttagtgacacaaatcaatatgtaatacagttcacccttgaacagcaagggtttcaactgcagggattcacttatatgcagattttcttctgcctctgcaatgcagagacagcaagatccacctctcctcttcctcctcagcctaatcaacctgaagatcataaagacctttgccaggatctactaatgctttatgaaaagtcaatatgtttttcctgatgacttcctttctaacagcttcatttctctagcttattttattgtacaaacacagtatataataatgcagcacaaacaaaatagttgttcatcaaccttttatgttatcaggaaggcttccagtcaatggtgggctattagtagctaaggtgaaggaatcaaaagttatactcagattttcaacagcacagggatcagggtccttcacccccacattattcatgggtcaactctagttatttgtttactaaatgtaaacaatttattataaaaatgaaatagaagatccatttgtataacaagtcccatttgttataatgtgactatagaggaaacatacaacatactaacttaaacatcttttttcttatttatgcaaaaatattatgtaggattttatggatcataattaaataaatgaatgtttttagacaataatatttgagattataaattagctacaactaccttcttaaataaatctgaatttcaaactaaagaagttaaatttaaaaaattaatttacatatgtatatacatatatacacattcaatttacacatattgttaaactggtcttttttgactgacactaccgtaatcttacatcttacttcttattttcttatcaagagtaggaccaccaagagaagtaagaaattcactatcagaagccttacctggtttgtcctttttaagtatcttatttttatgttccaaaatttgttgttgaattctaagtatacaaaagtaataaataaaattgctattttaatactgaaataaaaaatatttaccaaacatattaaattccaaaaccatttcagacaatatcagacctaatatcagaattttaaggtcccatacacttcaaatttttaaaccttacaagcttattaagcttataattaaagaagaaaagaaagcgaagtgcccataaatggaggaagcacagctcagtaaattaactctagttagctggatatcacgcaaagtgtcctgcactcacagtaagtcctcactctgtaaccaaaatacctcgttatgtaggtattttgttttcagacaagttgcttctcttaggctccgtggtttcttctaaaaaataaggattctgctaccttacttcactaggttgtttagaagatgtaatgagattacatgtttaaatgttcagagaaatagtaaagcaatggaataatttattcttgaaccttattgctgaaaccattttggaatcccaaataatgctcggtgtgtgtttttctataagttctaatattcaaatgttacagttttcagaaaatgttattaagtgctaattttggttattacttgcattcattgtggcttgtaattcagggcattttacctaattcataacttattactaaatttatatacatatataaatttagtgagctcatcactgagctcatcaatcacaccaagggcagaaaactaataggtgtcaaaacctggcttggacaactaccactccttctctacctcctcaaactctgagccagcagatctgtgcttggctgctggatctccatggtcctctccaactaacacacaagaagaaaccctgctatgattgtttttcagttccatgaaggaaatgcaagttgacattttctcatttccaagacacgtactagcaacatgtaacatccccttattactcagctctgttcccatttcagagatcaccgtacatcaatagtttcacagtgataatcacaatttcaatattgcgtgtcacctgttttggttttgctcacactgcttccttggagctactcaacaaatagtcaaatggccttcctgggactatgcaaaatatggaattctttctgaatttgcgtgccattcttaggcagtagccatgcttatctgctctgtattgatccaattttaaaatatgtgctgttgaaataagtacaaagccctgtttgatacatggatactcatgagtcatggatgaagcttagctctgttaaatccaactcacttacttcagattcagagaattttattgaatggcttcctgtgaggaggtagaattttaaaatatattgaaaacttgaggaagagctgcaagtagcccaggagattttcatgattatagagacacattaattgaggggccaactgcaagctggttcccactactcagtggaaagataacatggaacattctgctatctaaccaaagctgcttcacaggatataaaaaagcctcaaggtacagatctgatagcaaaagggaaagggaactctgatctcttcctgtaacattatttgaacatccctgactattgagaacaatcccaactaatattggttaaaggaaagacaagcatggctctcaaaggataacataccatgaaggcctaggcaaagtctagctaagaggcaggctccatataaggtttttagtgtaagatgagcatcaacttgctcaatatttgtgtggataaagctaggaggcctagctgccagagcacggtgctgggaacaatgactgagcacaagtacataaactattaaacaccgtagctttgaactgtatatatgaatcaccatgaaaactgagaggtctgaatcagtgaaggcatcctagtggcaaagatcaatcattaacagattgcaggaccggttacaatggcaataatacagcaagtgaggccatggaaataacagaatgattagaatgcccttttttccccttcttctgacttgtaaagaaagattgccttccttggacttaggaaaccccttagcttcttggaaaattcaaagaaggaaggcacaggagagagccccggggacaatacaagattttctgctaaattggacattacaagactcaataactaattagaaaagtcaggccagtcatggtggctagcactttcagaggccgaagcagggggattacttgagctcaggagttcaagaccagccagggaaacagagtgagaccttgcctctacaaaaaaaaaaaaaaaaaaaaaaaaaaaaaaaaaagaaaaaaaggaaaggaaaggaaaataaatcaaagatgtggctctttttatcccatgcatggggattatacttagaataaaatgaacaacattgagatccctagggataaaggtctcaaaaatccagaaaaaatcttgcactctacttctagctaatctagacttctgcttgatttctggctaaaaggtagactaactcatggctatttcaaactatctgaaccaaactatgaactctcacctaatgtatataagatggagtagttgcaattattttaaacttcaatttagtattaactggatttttaacataaacacttactttgtcaaatgatgagaaatagcgtaatcttctgcatctcgtccacatatgtctttagcgaagacatcaatattttgcttaagaaggatatttacaatacctggtgagtcatagtgtatagcaagcaagagggctgacctaaaataacaaagaaataactccactcaagaactttaataaagacttttttaaaaagctagttcgatacactttaccaatttaatatctgcctgtcagtgtagacgtaataaccatttgtatgtactagctttggtctataagcatctagggtgctcaagtgttcatctttgtaaattgtcaccaaggctaaaagaaagggacaacagggaagcctcttgtcccgctggggtaagacataatacaagttgtcaacttatagtcctttgatggccaagaaactgtgctgaggtcacttatctaaagtaggcaaagatttagatgaagattcccccattgctttcctagttaaatcagctaggggtcagataagagttatctgcaggctgaaaacaacaacaacaacaatgacaataataataataataatgacaatactagtagtcataaactaaaagtccacactttaaaaattaataaaactggtcaggtgcagtggctcatgcctgtaataccagcactttgggaagccaaggagagcagatcacgaggttaagaaatcgagaccatcctggccaacatggtgaaatcccatctctactaaaaatacaaaaattagctgggcatggtggcgtgcacctgtagtcccagctacttgggaggctgaggcaggagaatcgcttgaacctgggaggtggaggatgcagtgagccgagatcacaccacctcactccagcctggtaacagagcgagactctatctcaaaaacaaaaaaattaataaagctaatacaaaacgctttagctaataaaagattacagtatcaaaagcatctgattataaataccaaacactctatattataagagaagatgaatcctactatatactattctttatgttactcagtccaaatatttgctggtctacctgattattcatggtgatatttttcattatatgccaataattatgttaatcttcttattaatatttctgacttgagtgactgttaccactctagaatactcaggttttatttttaaaaaaagaacaactgtactgtctcagcctatcaacagcatgtgtacttgctttggttttcaataaaagttccaccattttctctttcttgcaaattatgacaaataaaagtggggtattattgtcctatgaaacagcagaaaaaaattaataattcacaaaattacatatttctcaactaaactgaaaatcttctctgggatgctttgaacttcaacatacaatatagaaaggaagtaaatgaaaagcagtcccttccttctcactcctctgtgctttctgatgtgctgcgctttgccttgcaacaaccctcctctgtctccccggattaactgtggtcattgccaaaactcactttaaacgtttactagtcccaagaatccttgctttgatcacagcacttagcatggtacattgtaatcatttcactgtttcccactgaaaccaagagcttcttgaggcaagggctgtatcttttgtctctatagctccaaaacccgaagacatagtagcaaacattttaagttttttacataaattaatgatctaaattattctcactaaagcagtgtttcttaaactatattccaaagaatatttgctttaccagaagtattatacccaaagagaaagactccatgaccatctgcatttgagaagtattataaaactgtatgttatgtccaataatcaagaaatctcttgaattttacctaatccccatttcacagtactatttgtggcaaacattaacatttgaggaattaagagttttaggggtacagttgccagagcttcccaatgccggtggaggtttcttctgggtggtacaaacttgcttgattcacttctatcaatgctgtcaggatcccagatgacaatgtcaggcactcctgctccaaatgggtcactatggaaatgagctctgaattaagagagattggcttcaaatgcacttattttccttattattaaatagtccatgggttttttccctaatacaagagaatagatttttatctttactgttagaaagctcagtatgttctgtgtaagagaaataggtttaaaaaacttaagaacaaatatttaaaaaaccaaagctcagtaagaaatactattctcaattttaatggtaatcccaggaccccagggcagctctaccttttaaatccatttttattggcttccacttaaagggctacttaaaattattttttattttagacaaaatataaatcagaaataaaaacataatggcttatcaataaaagttctcatactgatccatatgaattatttctggcataataaaagccagtaagtcactggcatttctaaggaagagcactgatgagaaagatgtaatgtctgcaatattcataaattatccaactataaccaggaataacctaaaaaggcttctagacattcttatgggcagataattatttgtggtatatataaagaaaagagtttcaaaaacttctaaattctaaaattcaactccataactgagggatttacatactctatagactatatattataacaaatacatgctgacttaaaaaccttgaaatctttatcaaaatatactataacataggagttgtaaactcagatacttacaaggacaaaggaaggttgcctgagtaaaggaagtactaaggtgggcacagtagcaaactggagaatacatgccttctctaaaggggcaacctctgcacagcagaccaaacagtgatagaaactcaggggacaccagatttgattttttagaataagcctgaagtccagatatctacaccagtcttctaaattttacatgctgattcaacttatagaggaaaacaaacaaatctgtgtaccacattagaatatagcccttgtgtttttatattcactattaatgtgttactaaatggttgtgtataatccaagtatttgcatgtaaaatactttctttctctagtatcatatgttttaccaaaaaatcaggctctcatatataataaaaattgccaaaaaagactcataatacctacttaaaaaatttttccaacatttattcatttaaaatatatttgtatataattttcccagattgttaaccaaatagataattggttcataggactgttaaaactaaattattaaaagaattcatatctgtatttttattaactccatggacttcaatgtttaaaactgacattttgggtatgctaaagctctataaacttaacaaacatactgagctagttcataataaaacttcaactaaacgaatagtttaggatttgctactattctaattgagaaagcccaaattgtaatgaacatttgttgacacataatcacgtgcatggtgacaaagggacatcaaatcatgaaagagccagcctctgcttattgaatgattacccataagcaaatttctaaagactctctgaatgttagtgaaggattcatggtgggaaggaaaaggtgctattctgtaaactgagagatattgccagtaatatttcctttcacttcccagtcacagatgtagagaaagacagataagtcaggctaatattactgaaaaggagaactttgaaggaagtagcacctatcgaatgccaattcttctagagatttcttacgtttttgagatacagaaattcatatgttgcacttatctattctggggttcttaatcaggactgtatccgaaacttgagggttttttttttttttttttttttttttttttttttttttttttgctgttattgttgttagaggcaagagtctcattatgttgctcaagctgaacttaaactcaggctcaagctgggactacaggaacatgtcactgtgcccagcttcaagaaaacattttttaaaatgttcaggccttattaggtctattacatcaaaatcctcaggggaaagcctacaattgtagatttttaacaaaatgtcatcaggtcactgtaatgcacaattctgagaattggtgcagcaatcacttcagtctcatctctcacccgcatggctaattccctttatcagttggacatgtggccaaaaagagaaaagagtaagagatagtgtcatttattaaaattccaattaagtttcctgggtatgggtagaacacagacaaataaactcaaaatcccacttgattttgctatttacaagctccttatctcccaccttcccaccaagacattctaggtttgagaggaggctttagactcttatctaagtggctgtttctgccagaatgggcaataagtcagttaataatttgtcctaccttctgctgaagtttttctcacttcatcaccacctattcactgccaaactggttccctcagagtcttcctgaaattaatctctaggcaagtttcaactcattctttttcaaaccaaaaattattagacccaaagctaaagagcaccttatctcaacacataaactggaagaacaacaaactaaaaaaaaaaaaacaaaaaaaactcttcttgtcgttttccctcattacctaatttccaagtgacctacatatttctcattgctctccttttccctacccatttttccctcttaaggcttgtgccactgagagatgatacatcagtttttcagaaaattatcagcagcagcaacatgtccatttattgtaagttgctttagttttgtttgagttttaagataaagcctagttccagggcatgttttctttcctgtgttgttttacaccaattcgaggggaaaaaaaggaaagaataaccctgcatagaaaaaaaaattgaaaaggttttacctttaacatattcacaaatattcagggaatggttgagcttccaaatataaaaaattgacccttacctatgtcaatgttaaaacaaatattttggaaagaaagttgattgatctataccttgtccagtgcttcaatatttgcaccatggaaaagcagtttttctgccagtgaggtgctctcactatacacagcatactggagagcagtgttgcggtagatatccttaaggtttggattggtgccatgttccagcagaataacggcgcaagcctcttcctggcaatggacagcctgtccgtattagaccaagaaatagattgtaaattctaagaaattcaaaataaacattccacaggtttcaccaactagttgtatttaaatgagatcaatttatttcaattctatgtatgcaaatcaaatccatgtcatgctaaaagagttggctctaatatacctgtatcaaaagcattctattttctttgtcacagatatcaatctggcattttctgctaaccaggagagtgaccactttcacatggccactggcacaggccaaatgtagagcagttctacgagagtaagaggactttttaggaaactgtagtgcaacatctcaaaacatacaatcattcatgtaactataaaaattgaagagcatgtttttcctctgccttcaaaacaaatacttaatttttttgaagaaagcacaatacttactagctcttattgctcagtgccttaataaaaacagtagcctatttgaatagaaagagctcagtctttggattcagttcaactagggcttgagtcctactttaaaccctgtctcttaccaactattgcttagcctttctgtgtctcaacttcctcattaataaagatgacaatagtagctatctcacagaaccccaccgtgatgcttaaatgagaagctatgtatttagaatagttcctacaacaactcaatagttgtaagatttttgttttttcagacaatgtctcacttttttgcccaggctggatgtaactatagctcactgcagcctggaactcctgggctcaagcgatcctccatccccagcctcctgagtagctgggactacagatgtgaatcagcatgcccagctatttatttaaaaatttttgtagagtaagaatctcacttcgttgcccaggatggtctcaaactcctggcatcaagcaatcctctcacctcagtctcccaaagttctgggattacaggtgtaagccactgcacccagccagatattataattgttactattactactacttaacaaaaacattttaattaggtaaaagacacaattatacctactttgcaggatggcttaaagagtaggtcacatttgaacacttctgacattggaatgtcacttatataactataattggtagcatttaaaaaattatcttatctatatataaaatagtggggcatctcacaatccatgagaccttacattaagtagaatatggtgtactaaacaggtctagggcagttctaggcatataactggtacataaatacattttagttcttaaaggtactatggggatagaacactgaaattataataatgcattttttaaacaaattaattctttgattttcaaacaaattgacaaaggaaactcatgattcaagtgaatacatatggctcattttattcaatatttatgcttacagaatatatgcaaataagaccttccaatgattaatattagcatttaagactgataaacttttgaatggcagttaaaggttatcttctactattttctaacttcagaaatgcttttgtttgaaagttgggagacaaactttcaaggagattaagtcccaatattcctattttaaatctctcagcttgtgcaggcagggcaggtaaacacgaagtttttaaggatagaagggtcctgagagatagcagaatatgtctgctacataacaggtactcaggttatgtttgatgaataaatggaatgaaagaatggataaatacagttgggaagttcaatatttttaaataacctcctataaagcaatatttttgcaatagtaattattcatatgttatttttatttttaaagaatacaattaaaatgaaatgattaatctatcattgtttgcataaattgaatgaatacataagaaaaacgtatgtacataataaaatatatagataataaaatctggaaacagataaaaacattccctttttacttctgaagaggctaaaagttcaaagaagataacaatacactcaataatgataaaaaatagaaagcgagaaattatttttaatattgtaagattcatattcccctcttcccaaggattattcctttactaataaactttactagaagttttgtacatgctcactgcagcaatcacagataagaaaaaggaaaagaactttacttaaaatacaaatgctcagaaattacaaattttatattttgtacatattttttgctaaaacaagaccatagtatgtttgtatgtataactttattgatttttttcctcactagctataacaaaatacatcttcacacatcaatatacttctgtatctattgccaccttcaatggtcacacattattctatcctgtggatgcaactgaaatttatttataggatccattctatgggttctttttaaaataagtgctgtgaaaaataaagtgcatgtatctttatttcctaagggtgttttagtataatggaattgatgggtaaagggcatacatgttttttaaatgtactacttaccaccaaattatctatttgaaaaataatcagcaacttaaactttaagcaggagtataaaacatcctcacaaatattgtggatagaaaactgtttcattcctcttttaatttaaattcttataccagaaatgcgaaggactttttcctatgtacacaagtaacttgcagatctggaaaaaagtactttgcccaattttagagtgtttgatgatttgatttgaaagaatttcctgtcaaatgaaaatgtacttttcatctaatgtgtatatataactgatatatatgacatattatatctggtatatacgtataagtatcagtcatatatacatacatatatatataaaatgatatataataagcaacataggctgggcgcggtggctcacacctgtaatcccagcactttgggaggcggaggagggaagatcacttgaggtctggagttcgagacaagcacggccaacgtggtgaaaccccctctctactaaatatacaaaaattagccaggcacgctggcacctgcctgtaatcccagctacttgggaggctgaggtaggagaattgcttgaacccagcaggcagaggttgcagtgagccaagattgtgccattggacaccagcctgggcaaagaagcgagactccgactcaaaaaaaaaaaaaaaaaaaaaagaatgtaatgaattccctataaaataaaaacatacttttcatctgaaaaaatatatatatagtatagtaaatatttttcaagtaagctctcttatctgagaacttttcgcctactacggtatttttgataggggaatgagttctctcattaggcacctcctataatgtatataaaccatgttttaaacgtgtacgttaaaaataacaacactgtgtatgcttaactttgtgagttaaatcactcaaattctccaactgctccagccagggaattatgagggatggaaaacagctgagagtccttttggctccgccgctccgagggtgcccggtgccctgcaaggccccatcccaggggctgcggggaagccgggcctggggaccccatcccatcacgggctgagcccccgctacctgtgctgcttgtccagggcgtccaggtctccgctcctgcgcgccaggcagcgctccacccccgcggcgtcgcccttgacagctgccctgtggatcttctgcagttcggagtcccggattcggtatccggaacccgtgtagacatgttctatagagccctgggccgtctggcccctgcggctcccgaaggcgaataacttcatagtggtgacttctcagacccccaacctctggctcttgagcgggggcagctccctgtcaccttttcaccaaccccctcccccgaccccggccgacccagccccaaatcccctatccaaccccaaatccctgatccaaccccaaatccgcgattcaacccccaatccgcgatcccaaatctatgatctactccacaatccgcgatccagcccggtccaccacagccttcagcagcgacactcgcagcctccgacctctcagaccgagtgagacttgaaaagccgttgggcgcgcgcctgcacggcggttgctgcccggctcccggaagccgctccctggaggcgcgcgccggcaggtggggctgcagctctgggcgggcgcaaatgggctcgcaggtcctcttgggatcgcccgggcggccccaggatctcaggagcgccgccagcccggcctgagaaggagagcctgtctggccttgcagcccaccccgctcctcctcggaagggagatagggtgctggcaagagcactccgcggccacctgggtggcttcgcggatggcccggcttcacgctgaggctctggccctggagtctgtgtggctagtatcaggtagctggagaagcatggaggcagagtcaggggctgctccttcccccactcgccctcactgctgccagtgccccacgcacagtttgcagctgcagatctggcactggcgctggatggcggagcttcccttagatggcctcagggtcgcagagcgcacagcccacctgggctcaaggtccgctcctcttgtacatctctctggatcctgggccctggcactgggcactctgtatccacacggatgaaactgagcggctgctggcggggcccgtcgcctgattttgccgcctgggggtctggcctcagtatccgcgctactggggggcgggcctggtctggggtgtccagtcacttgctgccggtgcaccacatctagactgcagctgcagctccgatgccggcctgagctggcgggcctggtacctgatgtcctcagggtcaagtgcatcgcccgcccacttgaggggttgcaatgacttggccttccaagaacgcaggggccgccggggctggctcttcatggtaaccgggatggtatcgagcagcaggttttcaccctggtgccgctgctgtgcggactgcctgacttgggcgcccaggcaccggcctcaggatccgcgtggcaggtgtgtgtgcgggtagggtgagtggcacggagggtcaggggttgctccgtcatctctgcccgtgtgcaacttgcagttttgcagttttctgcagcagctgaggcgctggcgtgggaaggcggagctcccctggatggcgtcaggtcaggtttgcaggcacagagcacagcccaccaggcctgagggtcctctcaggggccatggtggttgagttctccgtggaaactgggatggggtgaacggccagttcccgtcctttggccgcctggccaactgccagacttagccgctgccgcccaggcatctgcctctagggttgccgctatttggatagaagtgggggtcggggtggggcatggagcgtcaccggttgccaggccagcactgcctttgcaacatattcagatggcggcgggcagctcgggcaccagcatgggctggcggggctcccctggacagccctcaggtcgctcacagcattgtcccaggacttcctccggctgtgtcaggtgggcaaggtaggggggagcttccaaggcttctatcccaactctacctatttctagctattttctcttgagttattttgcctctatctcagttttatttgcaaaaatagtatatgcaaaatacatcgagtgaatgtacatcaggcatatagaagatctggcagaaacactttttctcatgcccatttccagtcactatttgaacacagaggcttccatggttttgattctttccacaaaaggttagttttgtctgttttcaccatttacgtaagtgaaactataaattatataatttttatgttcattcactaaacatgtttgtgacacttatcatgttgctcctattgattattcattaattttattttataatactcaattttatgactataccacaggtttgaggcctttgcttgttttgtttttaatccattccactattgatagacacaaaatcagtttctgatttgaggctatcatgaataaacctgctacgaacaaatcagatatacacgtttttctgtaataatattttcacatttcttgagtttaagtacataacagtggattttctgggttataaaataagtatatatttggcattgtatgaaatggggagacattttcctaagtggttgtgccatcttaaactacaatgaaaatgtttgagagaatcagttccactttctaaccaacacttgatgctgtcagttgttttagtgttatccattcttatgggatataactgctgagtagctgtctgccttcccaataacacagaaaattgagggctcagaggacagttttattttcatatttgacatcttctattattttttatagaagggtgatttgggtagtaaaattgtctttcaactttctaggttgtctctgaatcttactggggttccttgtcctaaaccacattcagaaattttcacgaccaacttctttttatctttgtcataccaggccaatgagggactgcattcctgagactttttaagtactttttgtgtgtatgatggtctaataatcatagccttaaaactttctggctgggcatggtggctcatggctgtaatcccagcacttcgagaggccgaggcgggtggatcacctgaggtcgggagttcgagaccagcctgaccaacatggagaaaccccaactctactaaaaataaaaataaaaaatagctgggcatgatggcacatgcctgtaatcccagctacttgggaggcaggagctacttgggctgaggcaggagaatcgcttgaacccacgaagtgggggttgtaatcagccgagatcacaccattgcactccagcctgggcaacaacagtgaaattccgtctcaaaaaaaaaaaaaaaaaaaaaaaagaatctcagacttctgggagacactgaatttgtgaatgtgtacagcatgtcacaataactttttttttttttttgagaccaagtctcactctgctgtccaagctggagtgcagtggcccatctcagctcactgcaacttctgtctcctagatacaagccactctcctgtcttggcctcccgagtagctgggattacaggtgctgcaaccacgcctggctaatttttgtatttttagtagagacagagtttcacatattggccaggctggtctcgaactcttcacctcagatgatccacctgcctcagccaatgggtggattgttaactcaaaatgcgcaccgttgaatactgaggaaaatgtatagccatcaacaccaacagctgagatgagagttgagataccagaaatgccccagcatgtaactcctcttttaattcacacacacacacacacacacacacacacacacacacacacacgtacactcatggtaaccagttcaggatggacacagaaacagtcacagtcttttttgggaacacactcccctgtgacacttagatcctaatgctgactccaattccctcccgggacctcccctctccttgcagcatgctgggctttcccttagaaaaccccatgtcatttcattcaatggaacatcaatcagcttcacccacagtgtctgcatgtctctgtccatagcaaatgtttttattactttaaaatatagatttttaccttaactagccaagacttaggaccctttttccaagctcttttagatgaagtaataaatgcaaatattagagatgtgtatatgtgtataaatatatggagaaaagatgttgcctagttgtacaaattagctttaacaaaactcctgatttaaattatttaattgtgagaagggcgattctaactcaacacaccaatgaaattaaagccttatccctctgctccgccaaaatataccatttatagcctgcgtgtgtgtgtacacacacgtgtgcactcatccccatctgaccgtatcaaattattatttaaactagatatttttactttgttgcatagtagtagtggtttctggaatgaaaaaaaaaaaacaaaaacaggagaataaaactgtttaaatgtatctccaggtgaacgctgtggccactgcaccgacccagccgatgatggcgcccagtacctgcgtctcaggaagaggttctggcggggcctccacctgaggccgcgcccctgggacctgtcccgcatccacgtgaacgcggagcgcagcattcaccatccgctccctgaaacagcggtccccgaggtgctccacaggcagggccgagctgggcgagggggagcccaggccctgcacgggccgccctgagcggcggggacgcaagaagagctcgccggctccaccagcccctaccccagacgcgggacctgggaccagagaggacctggagcccccgccccacggctgccaggaggctgacaggggcagctcctggggggctaccgccccgaggccgttccgccagaaattgagccacttgggaaggggcagcgccccacccctgaagaggaacctgtgtcctggaggcagcagcctgggagctactcctctgaggacagggcggaggcgagtgactctggtggcgcagcgcaggctttcccgtccgtggaggaggagagctgcggggctgggtgagctggaccagggagcacggctggctgctctcggcctccgatggggagtggacagcttaggaggttgcccccgtgccagccggtctgctggccacgctgagcttcatcaccgcctcacctgcctgcgcaggcgcctagcaccgcaggctggagcttctggccatgctggtcaacttccccaatgagcctccgcttgcctgggaacagcaaggccagggctacaccgccctgaacttggcagccatgtaccttggagatggtgaagctgctagtggggacctaggacgccgatgtggacatcagggactacattgggaaaagggcctcccagtatgtgagtcagagcatcacagaagagatcgagaccctggtgggagtcctggacaaggacgacggggagagcaccgccagcagcggggatgggtactggaagatttaaaaggtgccccctccatttcatcacctacaaactctcacaagtcctggaagatcgggggaccctcttcaccatcaccacttggctgaaggtggttcagaggtgaagccaaggattccagggcacacagcctcgggcaggactaatggacttaaaaaacacaggctcaacaaaatccacttcacaacccagatggttcacatcacaccctctttcagggacccagagcagccactggaagagaaggagtaggaacgctctcttaaaggccacttatcctattccttcaaattaagaccaaagtccaatgtatttaggtaaaaataatttcttttagaaaatgctaaggtttgtcttctgaaatttaataacagaaacaaaaaaagaacactagatgtaaggaagtgggaccagaaaagacaaactaaactatccttactaggttggaatggatggggtggagttcccatcaggctagcattctggggaaagtgttttttttttttttttttttggtgggggggcacggagtctcgctctgtcgcccaggctggaatggcctttgacatgtcaatgttttattgtaaatcgtgacagactatctacatagaatactcatgatttacaatttgagattgtcaacccagccagtaacctatgtagcactgaattcaaataccagaaaaaggacccagattccctcaccacctagcagagctcaagtgagctacacagcctggtaggaaatggggagtaattaaaaggttgtaagcaggtactactatagtcagattagtttttgacaggttattctaaaagcactgagaaaagaaaactgttgtagtattccagataagatcatatggtctgtaaaaggacagtgtcaaggatatagaaaagaacaatcaaggaatttcaaagggtaaactggatgtgattatatagtaccacatcaaatgaacatcaggctcaaagaaggcacgggggagcaggaggctgctttccccaggtactctctttcccaggcttgcccagtagtcctggcaactgacatatatatatatatatatatatatatatatatatatatatatatggaaaccatcattctgagcaaactattgcaatgacaaaaccaaacaccacatgttctcactcataggtggaaattgaacaacgagaacacttggacacaggatggggaacatcacacaccggggcctgtcatggggtggggggaggtgggagggatagcattaggagatatacctaatgtaaatgatgagttaatgggtgcagcacaccaacatgacacaggtatacatatgtaacaaacctgcacattgtacacatgtatgctagaacttaaagtataataaaaataaaaaataaagtcttcctcaagtttaccatcaaaaagtgctacacatgatttgcaagtattttcttccatcttgtgagttgtcttttcactttcttgatggtgtcctctgaagtgcaaaaatgtttaattttgatgaagtccaattcatcaatttttattcttgttgctggtctcatatttaagaaaactgccaaattcaaggtcatgacaatttactcctatgtttgcttctcaggattttatagttttagtccttatgtttatgtggattagctcaaaatgggtccatttgatccattgtttttgcatccacagtttttgtatatggtgttgggtaaaggtactatttcaggttttgcatatgtttacatatctagtagtccctgtgccagttttcaaacatctttccccactgaataatcttggcacccttgtcaaaaatcagtgtttatgtatgtatgggttcatatctgactctcaattctatcccactcgtctatacatctatacttctgccagtattatattgtccttattaccattgtcttgtagtaagttttaaagtcggtaagtatgagttctcctactttgtttctcattttcaaaagattattttggctattcttagtcctttgcaattccatatgaatttgagagtcagcttgtcgattttacagagaactcatctgggattctgacaggaatgaagttaaatctgtagacgagtttagggaggactgccatcttaacaatgttaagccttcggtccatgatcatgggatacttttacatttatttcgatcttctttcatttctttcaactatgttttatggttttcagagtacaagttttacacttcttaaatttattagtattttattcttgttgatgctatgataaatgaagttgctttcttaatttcattttctgattgctcattgtgagtatgtagtactcagttaaagtgtgtcaaatactattgatttttgtatattgatcttgtatcctgcaaccctgaagaacacaagggatttgtgtctggcatacataaggaacaattacaattcagtaataaaaaaacaaaacaacccaattagagatggataattcaagaatggattaaaaaaactgcaatacatgcaaacaaatggaatattattcagcaatttaaaaagtgagctatcaagccatgaaaaaacacagaagaaccctaaatgtatactgctgggtgaaagaagccagtctgaaaaggatacatactacatgatattatatgacattcagggagaggcaaaattagagagtaaaaagatcagtaatgaccgggggtttagaaggaagaggagggggaggaatgactcagtggagcacaggagatttttagggcaatgaaactgttctacataatgtccctgtatgacagctttgaagagagcagtggttctctcagcacgcagctggagatctgagaatgtgcagactgcctcctcaagtgggcccctgacccctgacccgtgagcagcctaactgggaggcaccccccagcaggggcacaccgacacctcacatggcagggtattccaacagacctgcagctgagggtcctgtctgttagaaggaaaattaacaaacagaaaggacattcacaccaaaaacccatctgtacatcaccatcatcaaagaccaaaagtagataaaaccacaaagatggggaaaaaacagaacagaaaaactggaaactctaaaagaagagcgcctctccttctccaaaggaattcagttcctcaccagcaatggaacaaagctggatggagaatgactttgacgagctgagagaagaaggcttcagacgatcaaattactctgagctaagggaggacattcaaaccaaaggcaaagaagttgaaaggcttgagaactatgtgaagaatgcagaagcctcaggagccgatgcgatcaactggaaaaaagagtatcagcaatggaagatgaaatgaatgaaatgaagcaagaagggaagtttagagaaaaaagaataaaaagaaatgagcaaagcctccaagaaatatgggactatgtgaaaagaccaaatctacgtctgattggtgtagatgggcaagtgatgggcagaatggaaccaagttggaaaacacgctgcaggatattatccaggagaacttccccaatctagcaaggcaggccaacattcagattcaggaaatacagagaacgccacaaagatactcctcgagaagagcaactccaagacacataattgtcagattcaccaaagttgaaatgaaggaaaaagcgttaagggcagccagagagaaaggtcgggttaccctcaaagggaagcccatcagactaacagcggatctcttggcagaaaccctacaagccagaagagagtgggggccaatattcaacattcttaaagaaaagaattttcaacccagaatttcatatccagccaaactaagcttcataagtgaaggagaaataaaatcctttacagacaagcaaatgctgacagattttgtcaccaccaggcctgccctaaaagagctcctgaaggaagtgctaaatatggaaagcaacaaccagtaccagccgctgcaaaatcaagccaaaatgtaaagaccatccagactaggaagaaactgcatcaactaacgagcaaaataacaagctaacatcataatgacaggattaaattcacacataacaatattaactttaaatgtaaatggactaaatgctccaattaaaagacacagactggcaaattggataaagagtcaagacccatcagtgtgctgtattcaggaaacccaactcacgtgcagagacacacataggctcaaaataaaaggatggaggaagatctaccaagcaaatggaaaacaaaaaaaggcaggggttgcaatcctagtctctgataaaacagactttaaactaacaaagatcaaaagagacaaagaaggccattacataatggtaaagggatcaattcaacaagaagagctaactatcctaaatatatatgcacccaatacaggagcacccagattcataaagcaaggcctgagtgacctacaaagagacttagactcccatacattaataacgggagactttaacaccccactgtcaatgttagacagatcaacaagacagaaagtcaacaaggatacccaggaattgaactcagctctgcaccaagcagacctaatagacatctacagaactctccaccccaaatcaacagaatatacatttttttcagcaccacaccacacctattccaaaactgaccacatatggaagtaaacctctcctcagcaaatgtaaaagaacagaaattataacaaactatctctcagaccacagtgcaatcaaactagaactcaggattaagaatctcactcaaaaccgctcaactacatggaaactgaacaacctgctcttgaatgactactgggtacataacgaaatgaatgcagaaataaagatgttctttgaaaccaacgagaacaaagacacaaaatacccgaatctctgggacgcattcaaagcagtgtgtagagggaaatttatagcactaaatgcccacaagagaaagcaggaaagatccaaaatggacaccctgacatcacaattaaaagaactagaaaagcaagagcaaacacattcaaaagctagcagaaggcaagaaataactaaaatcagagcagaactgaaggaaatagagacacaaaaaacccttcaaaaaattaatgaatccaggagctggttttttgaaaggatcaacaaaattgatagaccactagcaagactaataaagaaaaaaagagagaagaatcaaatagatgcaataaaaaatgataaaggggatatcaccactgatcccacagaaatacaaactaccatcagagaatactacaaacgcctctaggcaagtaaactagaaaatctagaagaaatggataaattcctcgacacatacactctcccaagactaaaccaggaagaagttgaatctctgaatagaccaataacaggatctgaaattgtggcaataatcaatagcttaccaaccaaaaagagtccaggaccagatggattcacagacgaattctaccagaggtacaaggaggaactggtaccattccttctgaaactattccaatcaatagaaaaagagggaatcctccctaactcattttatgaagccagcatcattctgataccaaagccaggcagagacacaacaaaaaaagagaattttagaccaatatccttgatgaacattgatgcaaaaatgctcaataaaatactggcaaaacgaatccagcagcacatcaaaaagcttatccaccatgatcaagtgggcttcatccctgggatgcaaggctggttcaatatacgcaaatcaataaatgtaatccagcatataaacagagccaaagacaaaaaccacatgagtatctcaatagatgcagaaaaagccattgacaaaattcaacaatgcttcatgctaaaaactctcaataaattaggtattgatgggacatatttcaaaataataagagctatctatgacaaacccacagccaatatcatactgaatgggcaaaaactggaagcattccctttgaaaactggcacaagacagggatgccctctctcaccactcctattcaacatggtgttggaagttctgatacaaaatcaatgtacaaaaatcacaagcattcttatacaccaacaacagacaaacagagagccaaatcatgagtgaactgccattcacaattgcttcaaagagaataaaatacctaggaatccaacttacaagggatgtgaaggacctcttcaaggagaactacaaaccactgctcaatgaaataaaagaggatacaaacaaatggaagaacattccatgctcatgggtaggaagaatcaatatcgtgaaaatggccatactgcccaaggtaatttacagattcaatgccatccccatcaagctaccaatgactatgaagaaattttaaatatcatcaagcatgttgagaggtgctagcgagggcatggagcaaggaatcaaattccataggtgattgttttctctatttttgtataaaaatgtccttgccccaattaaagcctccaccaagtataaaaagaaagcgtttggtgatattagcaagcaacagtttcccaaatctaccttgcccacctctttggcctaaactctgcaggtaatttattcaaaaaagagaagtgtcctttgggtaacagatgtatcacttcctactctcttaaaccaaactctgatgctgcatcttagataaaagccctcaaatctggcctcctgaagtcatgctgtcatttaacttggctgcaggcccctgatactctcctgcagggagagagtctgctctttgccccagcctttaccccattcctactttctttcactcagtccccctccactcccagcacacctctggcggtattttattattagtagtaagctttatttttatcaaaaagggggttgggggtatttttgagcttatgttgcagaatactttatataaccctaaaatatacattctgttcattagatttctagctgccccaactacataagctgagatgcttggtagaagcaatggaacaaatttctctagttttacaaatataacatttgactaatttagaacaaaaattaattattttcaaaatatttaacttattttagctttttagaaaaaaaaaactgtctgagtaaaacagggtacttcctatttcatttaaggagaaagccaagctgataatgccatcatactgcctagctttctcatgcatatgacactgatttgacttagaaagaaaaaagttttaatactctcttctacttcccactagcaggaaattccattcttgcctttccttttcaccatttcatctacaatcacctagaaaaatgatgtctggtgcatattaggcccttaataaaggaataaagaaatgtgtgaaaggaatttcttgaataactattttaaaactttttgaacaagaagactgttattaagagtgttcccgtgagcaggcaacaaacaaagacaaaagctattattcagagataaaaatgtccaaaacatggttaggatataactctctatcagtgcatgacaggtatctatcaagaagtctcagaaaaaataccaagaaacatcacaaccaaatgcataaatcttgaatgaaatctgtctctaaacaaacaaataccagctataaagatattcttggtagcactttgaggggccaaggtgagcagattgcctgagctcaggagttccagaccaccctgggcccagtctttactaaaatacaaaaaattagccaggcatggtgacaggtgggcctgtcgtcccagctactcaggaggctgaagaaggagaatcgcttgaacccgggaggcagaggttgcagtgagccgagatcgcaacactgcactccagcctgggtgacaaagttgagactctgtctcaaaaaaaaaaaaaaaaaaaaaattctccagacacttagggaaatttaagtattaactgcatattaggtggcattatggttttatttttttcttttttgagacagagtcttgctctgtctcccacgctggagtacagtggctcaatcttggcacactgcaagctccaccttccaggttcacaccattctcctgcctcagcctcccaagtagctgggactacaggtgcccaccaccacgcctgtctgatttttttatttttgtatttttagtggagacggtgtttcaccgtgctagccagcatggtttcgacctcctgaccttgtgatccacccacttcagcctcccaaagtgctgggattacaggtgtgatccactgcacccagccaggtgatattatggattcttaggtttaataatggtattgatgttatggagaaaaatgtccttattcttaggagataaatgcttatatatttaggagtgtcacaaaatctgcaccatactctcaaatgatttggcaaaaaactgtgtgtgtgtgtgtgtgtgtgtgtgtagaaagaaaaatcaagcaaatatggcaaaacattaatgattattcaatctaggtgctcactattctgttctgtatgttagaatttttttcaaaacaaaaagctggggagaaggagaaaaaattctaagagtcaaagaaactgtgtaatccccatttttatcactttttttgtgaccaagtgatttcactcaccattttattcatcagttccctatctacacacttagagcaaatgagataacatagaatgctttgcaaagtaaaaagcatgatacagaatacataatgtcatcgtaaccaacaacctctgaagtttaatcgcatccagacatctggcttctttttccctaccttcttatggttgtagatttcaccattgtaacagagccacatatatggatatgtcttcacttaaattgtctgcattccaaacagcaggtcaactaccaccaatgggtgaaatccaaagcagcagctggtgtatccattgacattctcaaaacaggatgcatctggacccctgtgtgcaatcttcatagcacacagacactaaacagaaaggcagtcattgctgccaaacaggacccaaatgccacacacagtgcaatgaagctataagctccctatggagagaaaagtagacaaatcaaaaatattcaatatccaatccaagtccacgttaaatcttgattccagaaacgtgcataaaccacttcaaagactaaaatttaaaccatcttttctatagcgatttcccatttggttggcaggcatacaggagtagagaatgatttaatttacttacaaatattcagaaaagatagtgacctctacattcaaccagctacagcagcttagcacccagccaaagcctgcatctctcccaccttaagatttagtggttggctagagttagcagcatccaggccacatatatctctgcattctaagtttgcttccaagataaagatacaaatgcaggctggctccaacctagccagagatcccaaccccactctctgcatcccaaaatccctcaaagacccaagagactttccagatttctacagtctcctctcaggttcccttgacagttaaatgtccactctttacctcaactagctgcaggtagaatataatgggtacaacagaaaatcactgtaagtgtaatatgaagatacacagcccttttaagcatttcattatattacatctagcttacttctaagtgatttattcagatgtgactgaagaaagtctaaagggaaaaaaagcaatttaatttgataaattaacttatcaattatagccaaattatttggctataaaaaattaaacattttaagctgacagaagatgcaaacattttaagttgacagaagatataaaatgttcactatcaaaatgtcgcaactgataaaaatgttctcaaatacttctgtctcaaagttgcattgttcattaaggaagcaaaataagtgggacatacacagcaacaacatccctcaaaaaacaacttggctcattcctataagccaggcagcaaatacatcatccttacatatgctaattaccttccaatttcaaattctcaactgtgaaataaagggccattttatttggctgctgccagttcaaaatgactgtttttattaaaacatctccaacttgaaaaatatttggtattttctaaaaaactgcaaattgcagcaaatggccagacaatttggaataaacaccctacagaaaaaatatatattcaagtttcataagtcactttgagcaatcctttgaggatatttcatttatatctaaatgaaccacaagtttagctggcttttccggaaaaccagaagcaaataaagtatgattataatgaaaaccatctcaagcaatttggaaatgaagtaccacatgtcctatgctgtcccttccatacacttgacaaaacagcctataacaaattgtttactttgagatttagcaggaaaattccatgagatttaaatgagatgactactaataagccatctacctttgactctattccaattaaaaatgggttaggaaagtgctttgaaaatcaagtgtgttcatcagggaatcatttacctaagtcttcttaacactgcttagtgaatattaagcctgatatagtatatacactctaaccactaaattgaaggggaaagagggagaacaaagaggcatgtaaagtacacttactttttctagtaggaaaaagccaattaaaactatcacctattggttttattggaatcagtcttacaggaggtcaaacttcctactctcgctacctattctcaatatttttcttatttcttcctaaacttctagagccgtgctgtccaataaatatgtgagccatatatgtaattttaaatgtactagtaaaccccattaaaagaaaaggtgaaattaattttaaatatacttaactcagtatgtcccaaatagtaatcatagtaataattttaacatgcaatcaatataaaaaattatcaagcagatattctacgctgttcttcccactccaatgacaaaatccagtatatttaacaaaacacatctcaattaggactagccaggatttcaagtgctcaacagttacaagtggctagcgcctactgaattggacactgcagtttcagtgcattgaatttctatcccacttagcgctaattaaaacttcaccctctcacctgacaattatgttaagatctcagtaagtaaccaactacaggcagtttcaagccctactttaccgctaattactcttacagcaatgcaatgaatcatgatttaaaattaaaaaaaaaaaaaactgctgttaaattattagtcaagtgcccagggcaatggacagtaaagaaataatgtaggccatgggccgagatgacaaaacggtccttttatttatttcaagctataacaataatctgaagccagccctgtaaaacagacatccattgaaaagggcatgctagttcttttgcttttttgtgtacttggcctcctgtgtccctaaacagacctcttctcagcagggtttgctcagcaagtcacttgttgagtcttgcggtctacagagggggtggggaatggcaggggctggcataggaatgagaggggaggaggcaaggtgaggggggcaaggtgaggaggggggcacttaaaggggagttcaagaccagcctgggcaacatggtgagatcaccgcccctcaccgccgccatctctggtctcactctggtctcacacacatgcacaaattaaatttaatgtaaaaattaaaaaattgttttaaaataagtgaaatatttacatggattatgtgtacattcattttgtagaactatacatcccatgtaactgggaactctttactcttctaacacaacatttatttagccacaaataaaagaagaccagtgatgtagcctgtacacaaaaaagtaagaaaacactggttaggctggggcaggggtggggggaagagatctacaaaattaaaattttattgggaagaatcactaattagaatcagaacaattactgctaagtagttaagaacagagcacaaggaacccagcgaagaagcagatatgattcagagcagagctcacagagcagatggtatctgagccaagactgatagaataacattaataagggccttcacggccatttattatcacttaactgcaatgcattttgtataagttatttctactcttcatatcaaccatggaaaataatacttactcttctcttttgaagttaaagaagtggtaagtggtctaagaagataaattaacataccaacaccaaatagctcaagttcagtgactcaagagtgcccgcgtctccccaagaggttgctcagcaggcagacgaggtagagagcccttccaagaagtgacagtgagatgtgaaaggtctcagtgtgtctctgagaacaacagaaaccagtacgtagaccaagtgggaaaagccacggaagaggcagggatttcctcttaagagagcaagaataaacagagcagggctgagggaagcgatggaaaacgggcagaataccatgcatttagtgagaaaaaaacaacttttactttagaaagggggaaagaatggtggtggtctaggtaagcctagaagcagaggaaagggcagtggagaaaaaataaacaaaatgtatgagtcagggttctccagagggacagaaccaacaagatacacatatatgtataagggagtttacgagagagaattggttcacacggttagaaggcagtcccacaataggctgtctgccaggtagggaaagagagaagctagtagtggctcagtccaagtccaaaagcctcaaaaccaggaaagcccgcagtgcttcagtatgaggccgagggcctgagagccttggggaagcggctgatgcaagtcccagagtccaaaggcataagaacctggagtctcatgtccaagggcaggaagaagggaagcaagtgtcctgcacgggaagaagaaaaaaagagagccagaagcttcagctagcaaggttatcccaccttcctctgactgctttgttctatacagtgcagcgtgtgtacaccacttttgtgatattattcctaatatccatggtaagaaagggtgatgttactcccaatagcgcatgggggtgtacattccctgtgatattattcctagtaggcaggggcagggaaaggatgacattactcccaatattgcagagggtgtactccccgccttgtgatattgttcctaatatttaggggatagtgggtgatattactcccaatatcacagggggtgtgcaccccccgtggtattcttcctaatatccgggggggggggggagaggttgatattactgtcaatgtcacagggggtgtacatcctcccgtgttattgttcctaatatctgggggggagaggatattactgtcaatatcacagggggtgtagactccttcggtgatgttgtttctaatatctgggggggagacgatgatatcactgtcaatatcgcaggggtgtacaccacccgtggtattgttcctaatattcaggggggagaggaaattactgtcaatatcacagtgggtgtacacctcttctgtgatattgttcctaatatccgggggggagaggttattactgtcaatatcgcagggagtgtaaaacccttctgtgatattgctcctaatatccggcgggggggagaggatattactctcaatattgcagggggtgtacaccccttctgtgatattgttcctaatatccaggtggggagaggatcatatcactttcaatatcgccaaatgtgtacatccccattgtgatattgttcctatatttaggggatagtggattatattactgtcaatatcgcaggaggtgtgcacccctcccccatggtattgttcctaatgtccagcaagggagaaaacactactactcccaacatggcagggggtgtacacgtcctatgcgatactgttcctatatccatgggggaaaaggatattgggaacaatattacaaacaatatcacaggggggtgtacatgtcctgcgatatgaggagtaatataaccctctccccctctggatattacaaactgtatcacagaggggtgtaaaccccctgcgatgtggaaagtaatatcatcctctcccccactggatattacaaacaatatcacagacggtgtacacatgaggtgtttacaatattgggagtaatatcatatcccccagtggatattatgaacaatatcacagaggggtgtatacacactctgccttatagggagtaatatactcctctcccaccctggatattacaaacaatatcacagagggtgtacacacagggtgtttatggtattggaagtagtattatctcccccatggatattactaataatatcgcaggggtgtgtacatcccctgtaatacagggagtaatatcatcctttcccagcctggatattacaaacaatatggcagggggcagtacaccctggcgatatgggtagtaacatcatctcctccccgcatggatattacgaacaatattctagggggttgtacaccccctgcaatatggggagtaacatcatcctctcccccactagatattataaacaatatcacaaggggagtgtacacttcctgcgataaaaggagaaatatcattctttccccccagagatattatgaacaatatcgcagggaattgttctcccatgctatatggggagtaacatcttcatcttccccctggatattatgaaaaataatgcaggggaatgtaaatcccctgcgatatggggagtaaaatcattctctctggccaggcgcggtggcttacacctgtaatcccagcactttgggaagccgaggcggggggatcacgagatcaggagatcgagaccatcctggctaacatggtgaaaccccgtctctactcaaaatacaaaaaaattagccaggcgcggtggcgggcacctgtagtcccagctactagggagactgaggcaggagaatggtgtgaacctgggaggcggtgcttgcagtgtgcccagatcaggccactacactccaacccgggtaacagagcgaggctctgtctcaaaaaaaaaaatcaaatcattctctccctccctggatattatggacaatatcacaggggggtgtacaacgagtttctagaatatatttgaggaggctgatgggcggtgtgtgcgtgcttcatggccttattcaattaaacactctgctctcaatttattgctaaatcctcattgagcccttagatttcataacggttgtcgcgagatttttctggatgtagaaaacgtttccatttcttgccacctcatgggctacaccttgacctaacgtttttatgtagatacttgtgcttactctgtggcctttccagggtttgctgaagatggaggtatttaggctgggcaagaggtggtgagataaattggggtttatcgattatagaacaggctcctttagagggatataaagcatggccaagtcctttgagttttaagctgttgcttgtagtgttctggcgaacagttttgttgatctaactgttcgagtttagggttaagcatagcggggtatctactcccagtttggatcttaactattttgtcttcagaatattaaaggcaccttcgtagttatttcagctggggttatttagaacttttttacaacttatttagaaactttcaggtttctaaatatatgaatgaaccataatataagcctcggccaatacaatgccggttaggcctcctactgtaaaaaggaaaataaatccccgggctcacagcattgcgggggatcatttgatattaccgctgtgaagtgtagctagctagtcagctaaaaactttgacgctagtaggaatagcaataattataatagcagaggtgaagcaggctcatgtatccacatctatccctaccataaatatacggtgggcccatacaataaaccgtaagaacccaactgatcctatagctcacactaggcccatatacctgaatggttcttttttttccagaatagtatgttacgacgtgggaaattatcccaaagcccagtgggatgaggatgtagacttcagagtgactaaagaatctgaataaatgctgatataagataggatcacctccgccagccaggtagaaaaaagtagtattaagattgcggtcagttaacagtatagtgatgccggcggctaggactcagagacaaaggagtagaagaactgctgtaattaggactaatcagatgaagaggggtgtgtgatattgggacatggctgggggttttatattaacaattgtggtaataaagttaatagcccctgaagtagaagaaacacctgccacgtggagtgaaaagatagtgaaatctacagaggcgtctgcatgtgttaggtttcctgctaagggaggactgttcagccggttccagtgccggcttctactatagtggatgtaagtaataataggaaggagggtgggaggagtcagaagctcatattatttatgcagagaaatgctatatctggggcaccaattatcagggggactaagcagttgccaagacctccaattatagtattactataaagaaaattatgacaaatgcataggctataacaatgacataaatttgatcatctagtagagttcagctcgaataaggcttaaagctgtactgactatccctgctcatgtgccaaataataaatataatgtcccgatatctttatggttggttgagaatagtcaactgtcagccaacataaatgaagtgagaaaaaagggtaaaatgactgagtagggcattagactgtacatctaaaaacagaggtcaagtcctgtttttaccagtcccgaggtgattttcatgttgaattgtaaattcaaagaagcagcttcaatcctgcttctctcaccttttttcccccagcagctggagaagtagattcaaatcagttgactagggagtttagctgttaagttttcgtgggtttaagtctcatcaatttagtaaggacttagcttacttaaagtgattgatctgtattcaattgaccaagggtgatctgtatctgagaaagtacatttcagggccaccatacaacagccgttcaaaaaggcctccaatatgggatagtcttatttattatctcagaaatatttctctttgctggattcttttgagcattctaccattctagcctagcccctactccagaattagtaggacattgacccccaacaggtatttctccccttgaccccctggaagtacctcttctgaatccatctgtattacttgcatcaggagtttcaattacttgagcccatcacagcctaacaaaaattaatcaaaaacatacaatccaagcactacttattacaattatattaggtatttacttcaccctcctacaagtctcagaatacttcaaagctacctttgctatttctgatggtatttatggctctacattttttatagctacaggctttcacagacttcacgtcattattggatcaacattcctctgccttctccgccaattaaaataccactttacatctagtcatcactttgcctttgaagccgctgcctgatatcgacactttgtagatgtagtatgactattcttgtatgtttctatttattgatgaggatcttactcttttagtataaatagtaccatgatttccaaagtttcgatagcatccgaaaaacagtaattcacctaacattaactctagtaatcaacatcctattagccctgttactaataattattacattttggcttccacaacttaatatatatatatatatagagagaaaaatatatatatatgtataaaataaatatatatagaaaaatctagcccttatgaatgcagatttgaccctctatcctctgcccacattcccttctccataaaattatttctagtagccatcacatttcccctatttgagttagaactcaccctactactacccttactgtgagcccttcaaataaactgatactaataatctctgcgatatgtgtagtgacttcatacttcacccccccgatattacagccaatatcagagtggagtgtgcaccctctgcaatatgggaagtgatatcatcgtctccccactggatgttatggacaatatcacaggaggtttactttctctgcgatatggggaataatatcctcctgtccccgcctggatgttagagatatttacaggggggtgtccaccccctgcaatatggggagtagtaatatcctctcctgccctggatgttatggacaatatatagggagatgtacaatcccttcgatatggggagtaatatcatcctcttccccctaaacgttacgaacagtatcacaggggggtgtacagcccctgcgatatctggagtagtatcatccccttcttccctaaatgttacagaaactatcacaggggtgtgtacaccttctgaaacatgggaataatattctcttcccctctggatgttatggacaacattacagtcgtgtgcaccctctatgatatgcggagtaatatcatcctctcccccacggatgtaagtgacaataccacaaacgggtttacatcccccgtgatatggggagtaatataatcctctttcccactggatattaacaatatcacacggggatgtacaacccctgtgatattcagaatatcttcgaatccactgaaaattataaacaatatcaccagtgtacactccctgtgatactggaagtaatatcatcctctaatcccttaaaaattatgaacagtatcacaggggagtgtatacttcctactatattgggagtaatatcattctgtcctcttctaaatattatgaacaatattacagaggatgtaacactccctgcgatatgtggagtaatatcatcctctcctcccctaaatgttgtgaacaatatcacaggaggttgtacacaacctgcgatattgtttgtagtatccagagggaaagaggatgctattactccccatatcacagggggtgtacacccccactgtgatatattcaataacatccagaagtaatattactgacaaaattgcagggggtgtaaaccccacctgtgataccgttcctaatatcccggggaagagaggatgatgttattcccaatattgcagggggtgtacacccaccctatgatattgttcttaatatccaggaggggagacaatggtattactcacagtatcaaagaggttgtacagcccccctgtgatagcttctaatatccagggggtgtacacaccccttgtgatattgttccaatatgtagggggaaggacaatgatattactgtctgtatcacagggggtgtacaacaagcccccccgggatatcattcctaatatccatgggaagaaagaatattacaatatcacagaagttgtacaccccctctgtgatattgttcctaatatcaaagacggaagggtatgatgttcttcccaaaatcacagggagtgtacacataccctgtgctatttttcctaatatcgagagtgagagacaatgatacttccaatatcgtaaggagtgtacactctccccatgataccaggtggggaaatgttgatattactccaaatatcgcagtgggtgtacacacgttttgcgatattgtttctaatatcaagtgggggggaaggattgtattactcccaacatattacaccccacactccattatactgttcttaatatccagatttggagaggatgatattactcccaaaatctcaggaggtgtagaccccttctgtgacactgtttcttatatacaggggaagactagatgatattactcccaacagtgcagggtgttacatgccatcccccatgatattgtctctaatatcaagttggggagagggtgatattgctccaaatagtgcaaagggtgcacaccagccctgtgatattattcctagtatccagaggaggagagaatggtattatttttaatatcacagagggtgcaaaccccccttgtgataccgctcctaacatccaaggggtagaggatgaaattactcccaatatcacagtgggtatacaccccctcccgtggtattgttcctaatatccagggggtataggatgatagtactataaatatcacaaggggtgtacaccccttctgatattgttactaatatccgtggggggagtcgatgatattacttccaatatcacagggcatgtataccccccttgtggtattgttcctaatatcctgggaggagactacaatattactggcaatatcgcagggggtgtgcattcccgtgatattgttcctaatgtccagcaagggagaaaatattactcccaatatggtgggggtgtacacttcccatgcaatatcgttcctaatatccatgggggaaaaggatgatattactctaaatgtcacaggaggtgtaaactgcccctgtgatattgttctcaatatccatggggggagagaatgatattactcccaatatcacaggtggtgtacacccctcctgttatattatttctaatatccaggttgggagagaataatattacaggtaaaatagcagggggtgtacactccgcctatgatattgttcctaatattctggggaagagtggacaatattactcccaatatcgcaggatgtgtacaccccctttgtgatattgttcctaatatccataggcggagagggtgatactactcccaatagtgcagaaaaggtacagcccctctgtgatatcattcccaatatccagaggggacaggatgatattactcccaataccacagagggcatacaccccctccccatgatattgttcgtaatacccagggggtagaggatgatattactcccaatatcgcagtgggtgtacacccaccctgtgatattgttcttaatatccatgtggaaagggtataaagttactcccaatatcacagggggtgtacaacccccttgtgatattgttcctaatattcggggaagagacaatgatatagctgtccatattgcaggtggtgtacaaccccctgggaatttgttcctaatattcagtggggaagatgatattaattaaaatgtcacagggggtatataacccctttgtgatattattcctaatatccagggaaataaagaatattattcccaatatcacaggggatgtatacccctctctgatactgtttctaatatccctggggggagtctataatattactggcaatatcataaggagtgtataccccccgttatattgttccttatgtccagcaagggagaaaatattaatcccaatatggaacagggtgcacacccatgaggtattgttcctaatatccagggagggaaaggatgatattactcccaatgttgcagtggtgtataaccccctgtgatattgttcctaatatctaggtggggaaagtacagtattactcccaatatagcaggggttgtacaccgcctttgtgatattgttctaaatatccatggggaaagaaaatgatagtactccccaatatcgcaggtggtgtacaaccccttgtgatactgtttctaatatccatattgggggaggatattactcccaatattgcacgtgttgcacagaccccctttgatattgtttgtactatgcagggtgtggggggagaggatgatattgggagtaatatcaccctctcttcccagatattaagagcaatattcagggtggtcaacacctcctgcaatattgagtataatatcctctcccaacctggatattaggaacaatatcacaggggcatgtacactcccttcctttcaccatatacaaaaatcagctcaagatggatgaaggacttatgtaagacccaaaactatataaaccctagaagaaaacttaggaaatatcattctggacatagacgctggcaaagatttcgcgatgaagattccaaaagcaattgcaacaagaagaattgatgagtgggacctaatgaaactaaagagcttcagcacagcaaaagaaactatcaacagagaacaccctacagaacagaagaaaatattttcaaattacatatctgaaaaaggtctaatactcagcatgtataaagaatcaataagcaaaaaacaaacccactacaaataggcaaagaacatgaacccccacattcaccatcctgaagtccatgtgcaacttctttctggatgctggacaaggacttgggtacaaagagggcactgaacgggttaacacttaagccgtctgtggattcttttttcaaaagacaacgtatgtgtggcaaacaaccatatgaaaaaatactcaacatcactaatcatcagaaaatcagaaccatgagataccatatcacaccggtcagaatggctattattaaaaaatcaaaacataacagacagtgctgagtttgtggaaaaaagggaatgcttatacactgctggtggtgatatagaaaggaaacagggaaatactgggtagaagagagtggttccctggcaaagccctgcccacaagcctggaaacccacggcactaaatgggaacaggcattcctgcttttgtacccaaaagttgtctttcagctcaccatgcaccccctgtcctgtacccatatatgccccagaccccaggctccagaagcagacaagcacatgaggagatgaacagaagagcagaattgcagaatgatgtggcagaaagaagagaaggagcatctgaatgccaagaggagtttggctggcagtggttggagagatcagcctctggatggcaaagctcccggggaagatcatcttcccattccatcccctttccagctccccatccatcccattgagtgccacctctaccacttaataaaacccccacattcaccatcctcaagtctgtgtgcaacttaattctttctggatgctggacaaggaactgggtaccaagaggacactgaacaggttaacacttaagccgtctgtggatggcaaagctaaaaaagtgcactgtaacacatgcacacttgggctgtgggagtcacaggcacccacccctagacagtaccatggccacttgccctgcctattgcacctgcctgtctgcatgctcccctgcccagtaaggggtttgacagcacacacagtggccagagaagccacatccctgttgcacatcctgccaaggggagtcagggaactctccagttacatcaggaatgtaaatttgttcagccactgtggaaagcagtttggagatttctgaaataacttaaaacagaactaccattcaacccagcaaccccattactgggtatatacccaaaggaatataaatcattctgtcataaacatatgcacgcatattttcattataacactattcacaatagcaaagacacggaatcaacttagatgcttgttaacagaagactggattaaaaaaatgcagcgtacacacaccatggaatactacacacctataaaataggatgaaataatgtcttttgcagcgacatgaatggagctggataccattattctaagtgaattaatgcaggaacagaaaaccgaacaaacacagcatgttctcacttataagtgggggctaaacattgagtccacatggacacaaagaagggaacaatagacacaaggtctactgtgggtggagggtggggggggagagtggggatcaaaaaactccctattagatactacgctcactatctggatgactacataatctgtacaccaaatcccactgacacacattttacccatataataaacctccacatgtacccactgaacctaaaataaatgttggaaggaaataaagttacaaccaactcttgtactattgtgaggaaacaatcatatgtgttgacaaaaaatcaactactaatagatttataatagtatatatgtagcagaaaaatatcagatataacttatatacccaaaagtatgacttaaaaacagcatgacaatctttatgatgggatattgtgcaactactagaagcacattttcggagattacttattaacatatgataatgactacattgagtggtttttagaagcatgaattgaaaccatgtataagcatgactttattgaacttatatataacattacacacacatttacataattataaaataagtatgctcatgttcataatatttatttatttatattcatatgtaaggtcaataggaagtaatctctgtatctgagttattatttcataaataatttatgcttgttctgtgaaaataaaaacactgctatggatcttccaagtatcctgaaaggatacagtttataattaaacaataacaattttagaaataattattttaaataaggctatgataaatctggtttcattgcacactttaactttgcaacatttcatgaagcatcccttgatcacgactctcatattcaggagttttttgagatcaaatgggacaatcagtatgaatctattttttagacatgcaaatggataactttaaatagcagtagcgatataatcagagtgcacagttgctctgggacaaaacttggaaatgagcatatttttagattcttaatgttttacacactttagcattccacagcaccattacatactcatttttctactagaataccttggtagaaattcacagtagagatcaggcttgtccttcatacattaactaatcaagtagaaaagtgcaaatgagaacacagtgccaaaaataggcaccacatggaaaaaagcatggaacttccaggaagccatttttgtagctttatagcccaattatatttttcctaatgtattgcacacaaaacttgggggaaaaaaaaagaggcagagagaaaacaggttatatcagccctatctcacaatccacaagttcatcctattagaggattaactatgtaaaacaaattttatctgctgaatgtcctatttagttaatcacaaaactgtacaagaacacacttgtgacttatttagcagcttgtttgttcgctttccactggcttcacaaatgtcctttggaaagagaaagtacatttggaaccctgtacaccttttctttctccagtaccctcttgtcacttccatcactaaggtgacagaagcaactaggggcaatgcatttttagcacaccttggtcagaggtatcctccaggagaaggatcagacctgcttgaaagcatgtcgttggaattgggaggcttctagtagctataacataagcactgatgtttactgttccctgccctccactttgatcactctgggaaacgttttttttaaaaaatcaattgtattgaaacataatttacataaaataaatactattttaaagtgcacagtttgctgagttttgccagatgtaaccatccaggtgaataaaattgattaaactgatctttcaaataataaattaaccttgcaatcttcctagaaatttaatttgttcacagtttattatccattctatgtactgctacattcaattggttattatgttttaaggacttttgagtctatgtttatgagggataaacgtcaaagttgtataatgcctttgtcttgatttggaatcagggcaatactgggttcataaaataagataggaagtgtccctttaaattttcttttatttttatttttatttttgagatggagattcactcttgttgcccaggctggagtgcaatggtgcaatttcggctctccgcaacctctgcctcccagattcaagctattctcctgcctctgtctcccgaggagctgggattacaggcaagcaccaccatgccctgctaattttgtacttttagtagagacgggggtttctccatgctggtcaggttggtctcaaactcctgaccccaggtgatctgcccgtcttggcctcccaaagtgctgggattacaggtgtgagccactgtgcccagcccttaaattctatttcttaaaaagagtccgttcaagattgatattatagatactcctcaacttacaatggtcttatgtcttaacgaactcatcctaaattgaaaatattgtaagtctaaaatgcatttaatatatttaacctactgaatatcatgacttagcctctcctaccttaaacttgctcagaacacttacattatcctacaattgggcaaaatcatctaccacaaggcccattttaaaatattgagtatctcatgaaatttattgaaaactatactgatagtgaaaaactggtcatattgatgctcatcattaatgtacacagatgaaagcaccattatcaagtcagaagagcacaagtcaaaccaccataagttgaggactctctgtactttcttaaatgtttgatagaattcacctaagaaaccatgtagcctgtaattatagaaatctttttaaattaaaaaaaattcttcaatacatagagaagctattactttttctatttcattttgcatcagttttaagaattagttttacaaataatttcccatgttattttatttgtcaaatgtattggcctaaggttttcataattatattgatgtctgtaggttctgtagttacatcctctatttaattcccattgtctacataatgtagcttctctaattttttttgagataaatcttgctagccattgtttatttaaaattttttttttcaaagaaccaatttgtgggtatattaattagctccagcttttgttatttgctgtgttgttggtttacatttttatctttatcatcttccttcttcttaatttggatatactttgctcatttttttagcctcttagaacctaaaggtcattgattgaagccttttattttcaatatattacatctataaatgtagctttaagaaatgatttatctgcattccacattttattaagtttttaaaaatttttctttcagtttaaactattttttttgtgtgtgaaacttttcttgcccaatgggtttttctgaagtattttgtttaatgttcaaatgttggggtgttattgtatatatcctactgttgtccatctctggttcatgatacaatgcatgttctccattgcacttacataacatgtctccatgtctctggtgaattcctcagtctttctaaaatgcttttgaagaatactggcagttattttgtagaatgtctctcctcaatttcagttagtctgatgttttctcacgattaggaccaaagttatacattttgtctaagaataccatagaattgatgttttgtcctactcagtgcatcatataagaagttacatgaagttcatttatcttattattagtaatgttaactttgatcacttggctaagttgacatctccactttgaagttactattctataattatcttgtgggaagatactttcatattatgcaaatatgttctttcccaacatatattcaccactaatcttagcatccctccaaggttctttcttgcaacaattattactatgatatttgcaaagtgatgattcttatattttatgtctcctacatttaatgaaatcttactgtaataaaatactgcccattctcaacctttggttattatttatgtcaatatggatttttttttttttttttgagatggagtcttgctttgtcatccaggctggtgtgcaatggtgcgatttctgctcactgcacttccaccttccgggattcaagccattctcctgcctcagcctcccgagtagctgggactacgggcatgtgccaccatgcccggctaatttttgtatttttagtagaggcagggattcaccacattggtcaggctggtcttaaactcctgacctcaagtggtctgcctgcctcagcctcccaaagttctgggaatacaggcatgagccaccgcacccggcctggattaatcgaaaattttcttctgtagattgtaatatattactattgttatttattttattgccccaattttctcaaatttgtctatggaagtttattcaaagtggattctgtctccttttcacattttccccattttgtgagcatttccttactttctaacatgacaaaatatttcaaactaatcttgtattttccctgcccaatcctgatatcaaatatgtccccaaggagccttgtttcctttaactggagaatggtgttctcattgttactgggatgatgttgtttctaggcccttttgttagaggagctagaaaatgtatgtatgtatactcacacatttatacacatctgtacttatttatacaattatctatctgtacatatactaaaaacaatgatttcataaaacttttgaccccaatccaacactagataaagactatataggcccatttattttcaaatcagcacataaacatagaaggattattaacaatataagctgtagcttatgttaaatgttgattggaacagacaataaattatggagaacttcagaggacactaagtttggatgggatcttggaagttgtacaggtcaatgccactccatctattggctgagtttcacaggttaatacatgaacaacaacaaaaataacctagatcagaagttaaagatcattttattgactatctgccgtgtctgtgccattgcaatgtactaggtgcacttaccagtcctctacttacaaactgcttttcacaaaatatgaaactccaggcaaagattcagacatatgatgtttgtttttaaaatctttctacagccttgtatcctttttcctttccttccttttaccctttttaaaatgtgttatgagttttatcttagactaacatctgtaatgttgctatacgccagtattcaattgctgtgtttgatgaacataaaatggtgtaaaacttcaattagtgtactttttaaataaagtatctatgaatgtatccagcaaaatgtttatgatttgagtattcacaaaatagtagttttctctgtatctaacaataatgtgaaaacccaaaatgaatataaaatattagctaataatagatttcaaagtattctataaatatgaaaaatatgatatattattactttcatatatgtaaaacattaataatttttgtcaacataaacatcatctttacacctaaacttgtattaattcaattaagagttaatatagtatcctaaagtcatcaaatattcaaaaataggatgtattcggacttggaatatacataaaattaactattttcagctgagcacagtggctcatgcctgtaattccagcactttgggaggccaaggtaggcagattgcttgagatcaggagtttcagaccagcctggccaacatggtgaaaccccatctctaccaaaaatagaagttagccaggcatggtggaacctgcctgtaatcccaactactctgaaggctgaggcaggagaatcacttgaacccaggaggcagaggttgcagtgagccaagattgcgccactgcactccagcctgggtgagagaatgacactctgtatcaaaataataataataataataatagtaataataataataactattttctgtgagtcccaagataaaatagcattacagaatacataataatcctgtttgcttttcttggttttattttttcatttagttttgttcaccttgaccagtgggctggtggttcttaggtgcaccaaagttttcatttttcagttcaagattttaaaaccttaatgtggtaatttccctaattttttttgacaattacgtcccaggttgcaagttaaaataaaattcccattttactaaagtccttggtttattaatgattttataatgacttaatatataatttaatgagtaatgaggggtactacatttcagaaatcaacactgaagaacttattcatggaaccaaacaccacctgtttctcaaacacctattaaaataaaaatacatataaataatttttaaaaataaacactaaaaataaagtgaaaatgaaaaaatatatatccaggtttaaaaaaaactacttcagttaaacaataaatactttttggggggactcaactctactacaaaattatttgttgtttattacaatcaataatacaggtaaaagaataagtttttaaaaatggaaaaattgtaaaaaataaaacgatattaacaaatattggtatactggtgaaggccgggctcggtggctgctttccaaagtggttacaccagtcgggtatggtggcacacacctgtaatctcagcacttctggaagctgaagcaggcagatcacttgagctcaggagtttgacacaaacctgggctacatcacaaaaccccatttctaccaaaaactgtaaaaatcagctgcacatgatagcatgcacctgtaagtcccagctacttaggaggctgaggtgagaggatcacttgtgcctggaaggtcacagctgcactggccatgttcatgtcactgcactccagcctgggcaacagagcaagattttgtctcaaaaaaaaaaaatgttggtgacaattggaataattggaactcagatacattactggtgggaacataaaatggtgtaatcaatttgagtgttttcttggcatttgatgtttttaaaaaatcaagacattgtttccctatgttgcccaggcttgtcctgaactcccgggctaagaaaatcctccaaactcagcatctcaaatacctgagattaaaagtgtgagccactgtgcctgaccagtgtaaccactttgaaaaacaatgtggcagtttctcaaagactaaatgtatagtaatcacataatgcaacaatttcactcctgagtgtaaatccaagagaaataaaaatatatgttcactctaaagcttacgtacgagagttcatagcagcctgactcatgatggtgaatacgcaaaaacaacacaaatgtccatcaactaatgaatggataaacataaactattactcagctataaaaggaaagaaatcctgatacacactataacatgaaagaaatttaaaaacattctgctaagagaaaaaaaaagcaaactacaaaagatcacacattgtacaattctatttctataaaaggtccagactaggcaaaactacaatgacagaaaataaatcagtggttgcctatgaacatgggggacgtaggaggtagtggctaagaggtgagggtttctcactcataagtgggtaactcataagtgggtaatcacttctaagaaagactgtagtgatggatgcacagctccttgaatattctaaaaaccactcaattgtatactttctttttttctttagttatttagagacagggtctccttttgtcacccatgctgtagtgcagtggtgccatctggtctcactgcaacctacggcttctaggctcaagtgatcttccagtctcatgtccccaagtagttgggaatacaggcatgagccaccacacccagctaatttttgtatttttgctagagatgctgttttgccatgttgcccagcctagtcgcaaactcctgaactcaagtgatccacctgcctcagctgcccaaagtcttagcgttataggaattagccactgtgcccggcctgaattgcgtactttgataaatgaattgcatgatatgttaatcatatttcaataacgttattatttaaaaaatggctgggcgtggcatggtgactcacgcctctgatctcagcacactgggaggccaaggtgggtggattgcctgatttcgggagttcgagaccagtctggccaacatactgaaaccctgtctctactaaaaatacaaaaatattagctgagagtggtgacatgttcctgtaattccagctagtcaggaggctgaggcaggggagttgcttgaaccagggaggtggaggttgcagtcagccgagatcacgccactgcattccagcctgtgtgacagagcaagagtccgtctccaaaagaaagaaagaaaaagaaaatgggcattgaacacaggtggctccacctacgtataatccaagcactttgggaagctgaggcagaatgatcacttgaggccaggagtctgaaaatatcctgagcaacacagcaagatcccgtctgtacaataaaaaataaagaagttagctgggcataggggcaaatgtatgtagtcccagctacttgggaggctgaggttggaggactgtttgagtccggggtttcaggctgcagtgaaccatgatcatgccaccgcactgcagcctgggtgacagaacaagaccctgtctctagaaggaaaaaaaaagaaatccaagtttttaacaccttctgagagtaatcaacattcaggaggaacagagaagaacaaaagaccactgaatggttgagggtgggttgctggtgaggttcagtggccagctgagtagtatctgaaaaatccgttagtaaaattatggcactaggggtgagttatgcggtcgaatgatgaatactaaatccagtacaaacacccatggtctttctttacatgaattcnnnnnnnnnnnnnnnnnnnnnnnnnnnnnnnnnnnnnnnnnnnnnnnnnnnnnnnnnnnnnnnnnnnnnnnnnnnnnnnnnnnnnnnnnnnnnnnnnnnnnnnnnnnnnnnnnnnnnnnnnnnnnnnnnnnnnnnnnnnnnnnnnnnnnnnnnnnnnnnnnnnnnnnnnnnnnnnnnnnnnnnnnnnnnnnnnnnnnnnnnnnnnnnnnnnnnnnnnnnnnnnnnnnnnnnnnnnnnnnnnnnnnnnnnnnnnnnnnnnnnnnnnnnnnnnnnnnnnnnnnnnnnnnnnnnnnnnnnnnnnnnnnnnnnnnnnnnnnnnnnnnnnnnnnnnnnnnnnnnnnnnnnnnnnnnnnnnnnnnnnnnnnnnnnnnnnnnnnnnnnnnnnnnnnnnnnnnnnnnnnnnnnnnnnnnnnnnnnnnnnnnnnnnnnnnnnnnnnnnnnnnnnnnnnnnnnnnnnnnnnnnnnnnnnnnnnnnnnnnnnnnnnnnnnnnnnnnnnnnnnnnnnnnnnnnnnnnnnnnnnnnnnnnnnnnnnnnnnnnnnnnnnnnnnnnnnnnnnnnnnnnnnnnnnnnnnnnnnnnnnnnnnnnnnnnnnnnnnnnnnnnnnnnnnnnnnnnnnnnnnnnnnnnnnnnnnnnnnnnnnnnnnnnnnnnnnnnnnnnnnnnnnnnnnnnnnnnnnnnnnnnnnnnnnnnnnnnnnnnnnnnnnnnnnnnnnnnnnnnnnnnnnnnnnnnnnnnnnnnnnnnnnnnnnnnnnnnnnnnnnnnnnnnnnnnnnnnnnnnnnnnnnnnnnnnnnnnnnnnnnnnnnnnnnnnnnnnnnnnnnnnnnnnnnnnnnnnnnnnnnnnnnnnnnnnnnnnnnnnnnnnnnnnnnnnnnnnnnnnnnnnnnnnnnnnnnnnnnnnnnnnnnnnnnnnnnnnnnnnnnnnnnnnnnnnnnnnnnnnnnnnnnnnnnnnnnnnnnnnnnnnnnnnnnnnnnnnnnnnnnnnnnnnnnnnnnnnnnnnnnnnnnnnnnnnnnnnnnnnnnnnnnnnnnnnnnnnnnnnnnnnnnnnnnnnnnnnnnnnnnnnnnnnnnnnnnnnnnnnnnnnnnnnnnnnnnnnnnnnnnnnnnnnnnnnnnnnnnnnnnnnnnnnnnnnnnnnnnnnnnnnnnnnnnnnnnnnnnnnnnnnnnnnnnnnnnnnnnnnnnnnnnnnnnnnnnnnnnnnnnnnnnnnnnnnnnnnnnnnnnnnnnnnnnnnnnnnnnnnnnnnnnnnnnnnnnnnnnnnnnnnnnnnnnnnnnnnnnnnnnnnnnnnnnnnnnnnnnnnnnnnnnnnnnnnnnnnnnnnnnnnnnnnnnnnnnnnnnnnnnnnnnnnnnnnnnnnnnnnnnnnnnnnnnnnnnnnnnnnnnnnnnnnnnnnnnnnnnnnnnnnnnnnnnnnnnnnnnnnnnnnnnnnnnnnnnnnnnnnnnnnnnnnnnnnnnnnnnnnnnnnnnnnnnnnnnnnnnnnnnnnnnnnnnnnnnnnnnnnnnnnnnnnnnnnnnnnnnnnnnnnnnnnnnnnnnnnnnnnnnnnnnnnnnnnnnnnnnnnnnnnnnnnnnnnnnnnnnnnnnnnnnnnnnnnnnnnnnnnnnnnnnnnnnnnnnnnnnnnnnnnnnnnnnnnnnnnnnnnnnnnnnnnnnnnnnnnnnnnnnnnnnnnnnnnnnnnnnnnnnnnnnnnnnnnnnnnnnnnnnnnnnnnnnnnnnnnnnnnnnnnnnnnnnnnnnnnnnnnnnnnnnnnnnnnnnnnnnnnnnnnnnnnnnnnnnnnnnnnnnnnnnnnnnnnnnnnnnnnnnnnnnnnnnnnnnnnnnnnnnnnnnnnnnnnnnnnnnnnnnnnnnnnnnnnnnnnnnnnnnnnnnnnnnnnnnnnnnnnnnnnnnnnnnnnnnnnnnnnnnnnnnnnnnnnnnnnnnnnnnnnnnnnnnnnnnnnnnnnnnnnnnnnnnnnnnnnnnnnnnnnnnnnnnnnnnnnnnnnnnnnnnnnnnnnnnnnnnnnnnnnnnnnnnnnnnnnnnnnnnnnnnnnnnnnnnnnnnnnnnnnnnnnnnnnnnnnnnnnnnnnnnnnnnnnnnnnnnnnnnnnnnnnnnnnnnnnnnnnnnnnnnnnnnnnnnnnnnnnnnnnnnnnnnnnnnnnnnnnnnnnnnnnnnnnnnnnnnnnnnnnnnnnnnnnnnnnnnnnnnnnnnnnnnnnnnnnnnnnnnnnnnnnnnnnnnnnnnnnnnnnnnnnnnnnnnnnnnnnnnnnnnnnnnnnnnnnnnnnnnnnnnnnnnnnnnnnnnnnnnnnnnnnnnnnnnnnnnnnnnnnnnnnnnnnnnnnnnnnnnnnnnnnnnnnnnnnnnnnnnnnnnnnnnnnnnnnnnnnnnnnnnnnnnnnnnnnnnnnnnnnnnnnnnnnnnnnnnnnnnnnnnnnnnnnnnnnnnnnnnnnnnnnnnnnnnnnnnnnnnnnnnnnnnnnnnnnnnnnnnnnnnnnnnnnnnnnnnnnnnnnnnnnnnnnnnnnnnnnnnnnnnnnnnnnnnnnnnnnnnnnnnnnnnnnnnnnnnnnnnnnnnnnnnnnnnnnnnnnnnnnnnnnnnnnnnnnnnnnnnnnnnnnnnnnnnnnnnnnnnnnnnnnnnnnnnnnnnnnnnnnnnnnnnnnnnnnnnnnnnnnnnnnnnnnnnnnnnnnnnnnnnnnnnnnnnnnnnnnnnnnnnnnnnnnnnnnnnnnnnnnnnnnnnnnnnnnnnnnnnnnnnnnnnnnnnnnnnnnnnnnnnnnnnnnnnnnnnnnnnnnnnnnnnnnnnnnnnnnnnnnnnnnnnnnnnnnnnnnnnnnnnnnnnnnnnnnnnnnnnnnnnnnnnnnnnnnnnnnnnnnnnnnnnnnnnnnnnnnnnnnnnnnnnnnnnnnnnnnnnnnnnnnnnnnnnnnnnnnnnnnnnnnnnnnnnnnnnnnnnnnnnnnnnnnnnnnnnnnnnnnnnnnnnnnnnnnnnnnnnnnnnnnnnnnnnnnnnnnnnnnnnnnnnnnnnnnnnnnnnnnnnnnnnnnnnnnnnnnnnnnnnnnnnnnnnnnnnnnnnnnnnnnnnnnnnnnnnnnnnnnnnnnnnnnnnnnnnnnnnnnnnnnnnnnnnnnnnnnnnnnnnnnnnnnnnnnnnnnnnnnnnnnnnnnnnnnnnnnnnnnnnnnnnnnnnnnnnnnnnnnnnnnnnnnnnnnnnnnnnnnnnnnnnnnnnnnnnnnnnnnnnnnnnnnnnnnnnnnnnnnnnnnnnnnnnnnnnnnnnnnnnnnnnnnnnnnnnnnnnnnnnnnnnnnnnnnnnnnnnnnnnnnnnnnnnnnnnnnnnnnnnnnnnnnnnnnnnnnnnnnnnnnnnnnnnnnnnnnnnnnnnnnnnnnnnnnnnnnnnnnnnnnnnnnnnnnnnnnnnnnnnnnnnnnnnnnnnnnnnnnnnnnnnnnnnnnnnnnnnnnnnnnnnnnnnnnnnnnnnnnnnnnnnnnnnnnnnnnnnnnnnnnnnnnnnnnnnnnnnnnnnnnnnnnnnnnnnnnnnnnnnnnnnnnnnnnnnnnnnnnnnnnnnnnnnnnnnnnnnnnnnnnnnnnnnnnnnnnnnnnnnnnnnnnnnnnnnnnnnnnnnnnnnnnnnnnnnnnnnnnnnnnnnnnnnnnnnnnnnnnnnnnnnnnnnnnnnnnnnnnnnnnnnnnnnnnnnnnnnnnnnnnnnnnnnnnnnnnnnnnnnnnnnnnnnnnnnnnnnnnnnnnnnnnnnnnnnnnnnnnnnnnnnnnnnnnnnnnnnnnnnnnnnnnnnnnnnnnnnnnnnnnnnnnnnnnnnnnnnnnnnnnnnnnnnnnnnnnnnnnnnnnnnnnnnnnnnnnnnnnnnnnnnnnnnnnnnnnnnnnnnnnnnnnnnnnnnnnnnnnnnnnnnnnnnnnnnnnnnnnnnnnnnnnnnnnnnnnnnnnnnnnnnnnnnnnnnnnnnnnnnnnnnnnnnnnnnnnnnnnnnnnnnnnnnnnnnnnnnnnnnnnnnnnnnnnnnnnnnnnnnnnnnnnnnnnnnnnnnnnnnnnnnnnnnnnnnnnnnnnnnnnnnnnnnnnnnnnnnnnnnnnnnnnnnnnnnnnnnnnnnnnnnnnnnnnnnnnnnnnnnnnnnnnnnnnnnnnnnnnnnnnnnnnnnnnnnnnnnnnnnnnnnnnnnnnnnnnnnnnnnnnnnnnnnnnnnnnnnnnnnnnnnnnnnnnnnnnnnnnnnnnnnnnnnnnnnnnnnnnnnnnnnnnnnnnnnnnnnnnnnnnnnnnnnnnnnnnnnnnnnnnnnnnnnnnnnnnnnnnnnnnnnnnnnnnnnnnnnnnnnnnnnnnnnnnnnnnnnnnnnnnnnnnnnnnnnnnnnnnnnnnnnnnnnnnnnnnnnnnnnnnnnnnnnnnnnnnnnnnnnnnnnnnnnnnnnnnnnnnnnnnnnnnnnnnnnnnnnnnnnnnnnnnnnnnnnnnnnnnnnnnnnnnnnnnnnnnnnnnnnnnnnnnnnnnnnnnnnnnnnnnnnnnnnnnnnnnnnnnnnnnnnnnnnnnnnnnnnnnnnnnnnnnnnnnnnnnnnnnnnnnnnnnnnnnnnnnnnnnnnnnnnnnnnnnnnnnnnnnnnnnnnnnnnnnnnnnnnnnnnnnnnnnnnnnnnnnnnnnnnnnnnnnnnnnnnnnnnnnnnnnnnnnnnnnnnnnnnnnnnnnnnnnnnnnnnnnnnnnnnnnnnnnnnnnnnnnnnnnnnnnnnnnnnnnnnnnnnnnnnnnnnnnnnnnnnnnnnnnnnnnnnnnnnnnnnnnnnnnnnnnnnnnnnnnnnnnnnnnnnnnnnnnnnnnnnnnnnnnnnnnnnnnnnnnnnnnnnnnnnnnnnnnnnnnnnnnnnnnnnnnnnnnnnnnnnnnnnnnnnnnnnnnnnnnnnnnnnnnnnnnnnnnnnnnnnnnnnnnnnnnnnnnnnnnnnnnnnnnnnnnnnnnnnnnnnnnnnnnnnnnnnnnnnnnnnnnnnnnnnnnnnnnnnnnnnnnnnnnnnnnnnnnnnnnnnnnnnnnnnnnnnnnnnnnnnnnnnnnnnnnnnnnnnnnnnnnnnnnnnnnnnnnnnnnnnnnnnnnnnnnnnnnnnnnnnnnnnnnnnnnnnnnnnnnnnnnnnnnnnnnnnnnnnnnnnnnnnnnnnnnnnnnnnnnnnnnnnnnnnnnnnnnnnnnnnnnnnnnnnnnnnnnnnnnnnnnnnnnnnnnnnnnnnnnnnnnnnnnnnnnnnnnnnnnnnnnnnnnnnnnnnnnnnnnnnnnnnnnnnnnnnnnnnnnnnnnnnnnnnnnnnnnnnnnnnnnnnnnnnnnnnnnnnnnnnnnnnnnnnnnnnnnnnnnnnnnnnnnnnnnnnnnnnnnnnnnnnnnnnnnnnnnnnnnnnnnnnnnnnnnnnnnnnnnnnnnnnnnnnnnnnnnnnnnnnnnnnnnnnnnnnnnnnnnnnnnnnnnnnnnnnnnnnnnnnnnnnnnnnnnnnnnnnnnnnnnnnnnnnnnnnnnnnnnnnnnnnnnnnnnnnnnnnnnnnnnnnnnnnnnnnnnnnnnnnnnnnnnnnnnnnnnnnnnnnnnnnnnnnnnnnnnnnnnnnnnnnnnnnnnnnnnnnnnnnnnnnnnnnnnnnnnnnnnnnnnnnnnnnnnnnnnnnnnnnnnnnnnnnnnnnnnnnnnnnnnnnnnnnnnnnnnnnnnnnnnnnnnnnnnnnnnnnnnnnnnnnnnnnnnnnnnnnnnnnnnnnnnnnnnnnnnnnnnnnnnnnnnnnnnnnnnnnnnnnnnnnnnnnnnnnnnnnnnnnnnnnnnnnnnnnnnnnnnnnnnnnnnnnnnnnnnnnnnnnnnnnnnnnnnnnnnnnnnnnnnnnnnnnnnnnnnnnnnnnnnnnnnnnnnnnnnnnnnnnnnnnnnnnnnnnnnnnnnnnnnnnnnnnnnnnnnnnnnnnnnnnnnnnnnnnnnnnnnnnnnnnnnnnnnnnnnnnnnnnnnnnnnnnnnnnnnnnnnnnnnnnnnnnnnnnnnnnnnnnnnnnnnnnnnnnnnnnnnnnnnnnnnnnnnnnnnnnnnnnnnnnnnnnnnnnnnnnnnnnnnnnnnnnnnnnnnnnnnnnnnnnnnnnnnnnnnnnnnnnnnnnnnnnnnnnnnnnnnnnnnnnnnnnnnnnnnnnnnnnnnnnnnnnnnnnnnnnnnnnnnnnnnnnnnnnnnnnnnnnnnnnnnnnnnnnnnnnnnnnnnnnnnnnnnnnnnnnnnnnnnnnnnnnnnnnnnnnnnnnnnnnnnnnnnnnnnnnnnnnnnnnnnnnnnnnnnnnnnnnnnnnnnnnnnnnnnnnnnnnnnnnnnnnnnnnnnnnnnnnnnnnnnnnnnnnnnnnnnnnnnnnnnnnnnnnnnnnnnnnnnnnnnnnnnnnnnnnnnnnnnnnnnnnnnnnnnnnnnnnnnnnnnnnnnnnnnnnnnnnnnnnnnnnnnnnnnnnnnnnnnnnnnnnnnnnnnnnnnnnnnnnnnnnnnnnnnnnnnnnnnnnnnnnnnnnnnnnnnnnnnnnnnnnnnnnnnnnnnnnnnnnnnnnnnnnnnnnnnnnnnnnnnnnnnnnnnnnnnnnnnnnnnnnnnnnnnnnnnnnnnnnnnnnnnnnnnnnnnnnnnnnnnnnnnnnnnnnnnnnnnnnnnnnnnnnnnnnnnnnnnnnnnnnnnnnnnnnnnnnnnnnnnnnnnnnnnnnnnnnnnnnnnnnnnnnnnnnnnnnnnnnnnnnnnnnnnnnnnnnnnnnnnnnnnnnnnnnnnnnnnnnnnnnnnnnnnnnnnnnnnnnnnnnnnnnnnnnnnnnnnnnnnnnnnnnnnnnnnnnnnnnnnnnnnnnnnnnnnnnnnnnnnnnnnnnnnnnnnnnnnnnnnnnnnnnnnnnnnnnnnnnnnnnnnnnnnnnnnnnnnnnnnnnnnnnnnnnnnnnnnnnnnnnnnnnnnnnnnnnnnnnnnnnnnnnnnnnnnnnnnnnnnnnnnnnnnnnnnnnnnnnnnnnnnnnnnnnnnnnnnnnnnnnnnnnnnnnnnnnnnnnnnnnnnnnnnnnnnnnnnnnnnnnnnnnnnnnnnnnnnnnnnnnnnnnnnnnnnnnnnnnnnnnnnnnnnnnnnnnnnnnnnnnnnnnnnnnnnnnnnnnnnnnnnnnnnnnnnnnnnnnnnnnnnnnnnnnnnnnnnnnnnnnnnnnnnnnnnnnnnnnnnnnnnnnnnnnnnnnnnnnnnnnnnnnnnnnnnnnnnnnnnnnnnnnnnnnnnnnnnnnnnnnnnnnnnnnnnnnnnnnnnnnnnnnnnnnnnnnnnnnnnnnnnnnnnnnnnnnnnnnnnnnnnnnnnnnnnnnnnnnnnnnnnnnnnnnnnnnnnnnnnnnnnnnnnnnnnnnnnnnnnnnnnnnnnnnnnnnnnnnnnnnnnnnnnnnnnnnnnnnnnnnnnnnnnnnnnnnnnnnnnnnnnnnnnnnnnnnnnnnnnnnnnnnnnnnnnnnnnnnnnnnnnnnnnnnnnnnnnnnnnnnnnnnnnnnnnnnnnnnnnnnnnnnnnnnnnnnnnnnnnnnnnnnnnnnnnnnnnnnnnnnnnnnnnnnnnnnnnnnnnnnnnnnnnnnnnnnnnnnnnnnnnnnnnnnnnnnnnnnnnnnnnnnnnnnnnnnnnnnnnnnnnnnnnnnnnnnnnnnnnnnnnnnnnnnnnnnnnnnnnnnnnnnnnnnnnnnnnnnnnnnnnnnnnnnnnnnnnnnnnnnnnnnnnnnnnnnnnnnnnnnnnnnnnnnnnnnnnnnnnnnnnnnnnnnnnnnnnnnnnnnnnnnnnnnnnnnnnnnnnnnnnnnnnnnnnnnnnnnnnnnnnnnnnnnnnnnnnnnnnnnnnnnnnnnnnnnnnnnnnnnnnnnnnnnnnnnnnnnnnnnnnnnnnnnnnnnnnnnnnnnnnnnnnnnnnnnnnnnnnnnnnnnnnnnnnnnnnnnnnnnnnnnnnnnnnnnnnnnnnnnnnnnnnnnnnnnnnnnnnnnnnnnnnnnnnnnnnnnnnnnnnnnnnnnnnnnnnnnnnnnnnnnnnnnnnnnnnnnnnnnnnnnnnnnnnnnnnnnnnnnnnnnnnnnnnnnnnnnnnnnnnnnnnnnnnnnnnnnnnnnnnnnnnnnnnnnnnnnnnnnnnnnnnnnnnnnnnnnnnnnnnnnnnnnnnnnnnnnnnnnnnnnnnnnnnnnnnnnnnnnnnnnnnnnnnnnnnnnnnnnnnnnnnnnnnnnnnnnnnnnnnnnnnnnnnnnnnnnnnnnnnnnnnnnnnnnnnnnnnnnnnnnnnnnnnnnnnnnnnnnnnnnnnnnnnnnnnnnnnnnnnnnnnnnnnnnnnnnnnnnnnnnnnnnnnnnnnnnnnnnnnnnnnnnnnnnnnnnnnnnnnnnnnnnnnnnnnnnnnnnnnnnnnnnnnnnnnnnnnnnnnnnnnnnnnnnnnnnnnnnnnnnnnnnnnnnnnnnnnnnnnnnnnnnnnnnnnnnnnnnnnnnnnnnnnnnnnnnnnnnnnnnnnnnnnnnnnnnnnnnnnnnnnnnnnnnnnnnnnnnnnnnnnnnnnnnnnnnnnnnnnnnnnnnnnnnnnnnnnnnnnnnnnnnnnnnnnnnnnnnnnnnnnnnnnnnnnnnnnnnnnnnnnnnnnnnnnnnnnnnnnnnnnnnnnnnnnnnnnnnnnnnnnnnnnnnnnnnnnnnnnnnnnnnnnnnnnnnnnnnnnnnnnnnnnnnnnnnnnnnnnnnnnnnnnnnnnnnnnnnnnnnnnnnnnnnnnnnnnnnnnnnnnnnnnnnnnnnnnnnnnnnnnnnnnnnnnnnnnnnnnnnnnnnnnnnnnnnnnnnnnnnnnnnnnnnnnnnnnnnnnnnnnnnnnnnnnnnnnnnnnnnnnnnnnnnnnnnnnnnnnnnnnnnnnnnnnnnnnnnnnnnnnnnnnnnnnnnnnnnnnnnnnnnnnnnnnnnnnnnnnnnnnnnnnnnnnnnnnnnnnnnnnnnnnnnnnnnnnnnnnnnnnnnnnnnnnnnnnnnnnnnnnnnnnnnnnnnnnnnnnnnnnnnnnnnnnnnnnnnnnnnnnnnnnnnnnnnnnnnnnnnnnnnnnnnnnnnnnnnnnnnnnnnnnnnnnnnnnnnnnnnnnnnnnnnnnnnnnnnnnnnnnnnnnnnnnnnnnnnnnnnnnnnnnnnnnnnnnnnnnnnnnnnnnnnnnnnnnnnnnnnnnnnnnnnnnnnnnnnnnnnnnnnnnnnnnnnnnnnnnnnnnnnnnnnnnnnnnnnnnnnnnnnnnnnnnnnnnnnnnnnnnnnnnnnnnnnnnnnnnnnnnnnnnnnnnnnnnnnnnnnnnnnnnnnnnnnnnnnnnnnnnnnnnnnnnnnnnnnnnnnnnnnnnnnnnnnnnnnnnnnnnnnnnnnnnnnnnnnnnnnnnnnnnnnnnnnnnnnnnnnnnnnnnnnnnnnnnnnnnnnnnnnnnnnnnnnnnnnnnnnnnnnnnnnnnnnnnnnnnnnnnnnnnnnnnnnnnnnnnnnnnnnnnnnnnnnnnnnnnnnnnnnnnnnnnnnnnnnnnnnnnnnnnnnnnnnnnnnnnnnnnnnnnnnnnnnnnnnnnnnnnnnnnnnnnnnnnnnnnnnnnnnnnnnnnnnnnnnnnnnnnnnnnnnnnnnnnnnnnnnnnnnnnnnnnnnnnnnnnnnnnnnnnnnnnnnnnnnnnnnnnnnnnnnnnnnnnnnnnnnnnnnnnnnnnnnnnnnnnnnnnnnnnnnnnnnnnnnnnnnnnnnnnnnnnnnnnnnnnnnnnnnnnnnnnnnnnnnnnnnnnnnnnnnnnnnnnnnnnnnnnnnnnnnnnnnnnnnnnnnnnnnnnnnnnnnnnnnnnnnnnnnnnnnnnnnnnnnnnnnnnnnnnnnnnnnnnnnnnnnnnnnnnnnnnnnnnnnnnnnnnnnnnnnnnnnnnnnnnnnnnnnnnnnnnnnnnnnnnnnnnnnnnnnnnnnnnnnnnnnnnnnnnnnnnnnnnnnnnnnnnnnnnnnnnnnnnnnnnnnnnnnnnnnnnnnnnnnnnnnnnnnnnnnnnnnnnnnnnnnnnnnnnnnnnnnnnnnnnnnnnnnnnnnnnnnnnnnnnnnnnnnnnnnnnnnnnnnnnnnnnnnnnnnnnnnnnnnnnnnnnnnnnnnnnnnnnnnnnnnnnnnnnnnnnnnnnnnnnnnnnnnnnnnnnnnnnnnnnnnnnnnnnnnnnnnnnnnnnnnnnnnnnnnnnnnnnnnnnnnnnnnnnnnnnnnnnnnnnnnnnnnnnnnnnnnnnnnnnnnnnnnnnnnnnnnnnnnnnnnnnnnnnnnnnnnnnnnnnnnnnnnnnnnnnnnnnnnnnnnnnnnnnnnnnnnnnnnnnnnnnnnnnnnnnnnnnnnnnnnnnnnnnnnnnnnnnnnnnnnnnnnnnnnnnnnnnnnnnnnnnnnnnnnnnnnnnnnnnnnnnnnnnnnnnnnnnnnnnnnnnnnnnnnnnnnnnnnnnnnnnnnnnnnnnnnnnnnnnnnnnnnnnnnnnnnnnnnnnnnnnnnnnnnnnnnnnnnnnnnnnnnnnnnnnnnnnnnnnnnnnnnnnnnnnnnnnnnnnnnnnnnnnnnnnnnnnnnnnnnnnnnnnnnnnnnnnnnnnnnnnnnnnnnnnnnnnnnnnnnnnnnnnnnnnnnnnnnnnnnnnnnnnnnnnnnnnnnnnnnnnnnnnnnnnnnnnnnnnnnnnnnnnnnnnnnnnnnnnnnnnnnnnnnnnnnnnnnnnnnnnnnnnnnnnnnnnnnnnnnnnnnnnnnnnnnnnnnnnnnnnnnnnnnnnnnnnnnnnnnnnnnnnnnnnnnnnnnnnnnnnnnnnnnnnnnnnnnnnnnnnnnnnnnnnnnnnnnnnnnnnnnnnnnnnnnnnnnnnnnnnnnnnnnnnnnnnnnnnnnnnnnnnnnnnnnnnnnnnnnnnnnnnnnnnnnnnnnnnnnnnnnnnnnnnnnnnnnnnnnnnnnnnnnnnnnnnnnnnnnnnnnnnnnnnnnnnnnnnnnnnnnnnnnnnnnnnnnnnnnnnnnnnnnnnnnnnnnnnnnnnnnnnnnnnnnnnnnnnnnnnnnnnnnnnnnnnnnnnnnnnnnnnnnnnnnnnnnnnnnnnnnnnnnnnnnnnnnnnnnnnnnnnnnnnnnnnnnnnnnnnnnnnnnnnnnnnnnnnnnnnnnnnnnnnnnnnnnnnnnnnnnnnnnnnnnnnnnnnnnnnnnnnnnnnnnnnnnnnnnnnnnnnnnnnnnnnnnnnnnnnnnnnnnnnnnnnnnnnnnnnnnnnnnnnnnnnnnnnnnnnnnnnnnnnnnnnnnnnnnnnnnnnnnnnnnnnnnnnnnnnnnnnnnnnnnnnnnnnnnnnnnnnnnnnnnnnnnnnnnnnnnnnnnnnnnnnnnnnnnnnnnnnnnnnnnnnnnnnnnnnnnnnnnnnnnnnnnnnnnnnnnnnnnnnnnnnnnnnnnnnnnnnnnnnnnnnnnnnnnnnnnnnnnnnnnnnnnnnnnnnnnnnnnnnnnnnnnnnnnnnnnnnnnnnnnnnnnnnnnnnnnnnnnnnnnnnnnnnnnnnnnnnnnnnnnnnnnnnnnnnnnnnnnnnnnnnnnnnnnnnnnnnnnnnnnnnnnnnnnnnnnnnnnnnnnnnnnnnnnnnnnnnnnnnnnnnnnnnnnnnnnnnnnnnnnnnnnnnnnnnnnnnnnnnnnnnnnnnnnnnnnnnnnnnnnnnnnnnnnnnnnnnnnnnnnnnnnnnnnnnnnnnnnnnnnnnnnnnnnnnnnnnnnnnnnnnnnnnnnnnnnnnnnnnnnnnnnnnnnnnnnnnnnnnnnnnnnnnnnnnnnnnnnnnnnnnnnnnnnnnnnnnnnnnnnnnnnnnnnnnnnnnnnnnnnnnnnnnnnnnnnnnnnnnnnnnnnnnnnnnnnnnnnnnnnnnnnnnnnnnnnnnnnnnnnnnnnnnnnnnnnnnnnnnnnnnnnnnnnnnnnnnnnnnnnnnnnnnnnnnnnnnnnnnnnnnnnnnnnnnnnnnnnnnnnnnnnnnnnnnnnnnnnnnnnnnnnnnnnnnnnnnnnnnnnnnnnnnnnnnnnnnnnnnnnnnnnnnnnnnnnnnnnnnnnnnnnnnnnnnnnnnnnnnnnnnnnnnnnnnnnnnnnnnnnnnnnnnnnnnnnnnnnnnnnnnnnnnnnnnnnnnnnnnnnnnnnnnnnnnnnnnnnnnnnnnnnnnnnnnnnnnnnnnnnnnnnnnnnnnnnnnnnnnnnnnnnnnnnnnnnnnnnnnnnnnnnnnnnnnnnnnnnnnnnnnnnnnnnnnnnnnnnnnnnnnnnnnnnnnnnnnnnnnnnnnnnnnnnnnnnnnnnnnnnnnnnnnnnnnnnnnnnnnnnnnnnnnnnnnnnnnnnnnnnnnnnnnnnnnnnnnnnnnnnnnnnnnnnnnnnnnnnnnnnnnnnnnnnnnnnnnnnnnnnnnnnnnnnnnnnnnnnnnnnnnnnnnnnnnnnnnnnnnnnnnnnnnnnnnnnnnnnnnnnnnnnnnnnnnnnnnnnnnnnnnnnnnnnnnnnnnnnnnnnnnnnnnnnnnnnnnnnnnnnnnnnnnnnnnnnnnnnnnnnnnnnnnnnnnnnnnnnnnnnnnnnnnnnnnnnnnnnnnnnnnnnnnnnnnnnnnnnnnnnnnnnnnnnnnnnnnnnnnnnnnnnnnnnnnnnnnnnnnnnnnnnnnnnnnnnnnnnnnnnnnnnnnnnnnnnnnnnnnnnnnnnnnnnnnnnnnnnnnnnnnnnnnnnnnnnnnnnnnnnnnnnnnnnnnnnnnnnnnnnnnnnnnnnnnnnnnnnnnnnnnnnnnnnnnnnnnnnnnnnnnnnnnnnnnnnnnnnnnnnnnnnnnnnnnnnnnnnnnnnnnnnnnnnnnnnnnnnnnnnnnnnnnnnnnnnnnnnnnnnnnnnnnnnnnnnnnnnnnnnnnnnnnnnnnnnnnnnnnnnnnnnnnnnnnnnnnnnnnnnnnnnnnnnnnnnnnnnnnnnnnnnnnnnnnnnnnnnnnnnnnnnnnnnnnnnnnnnnnnnnnnnnnnnnnnnnnnnnnnnnnnnnnnnnnnnnnnnnnnnnnnnnnnnnnnnnnnnnnnnnnnnnnnnnnnnnnnnnnnnnnnnnnnnnnnnnnnnnnnnnnnnnnnnnnnnnnnnnnnnnnnnnnnnnnnnnnnnnnnnnnnnnnnnnnnnnnnnnnnnnnnnnnnnnnnnnnnnnnnnnnnnnnnnnnnnnnnnnnnnnnnnnnnnnnnnnnnnnnnnnnnnnnnnnnnnnnnnnnnnnnnnnnnnnnnnnnnnnnnnnnnnnnnnnnnnnnnnnnnnnnnnnnnnnnnnnnnnnnnnnnnnnnnnnnnnnnnnnnnnnnnnnnnnnnnnnnnnnnnnnnnnnnnnnnnnnnnnnnnnnnnnnnnnnnnnnnnnnnnnnnnnnnnnnnnnnnnnnnnnnnnnnnnnnnnnnnnnnnnnnnnnnnnnnnnnnnnnnnnnnnnnnnnnnnnnnnnnnnnnnnnnnnnnnnnnnnnnnnnnnnnnnnnnnnnnnnnnnnnnnnnnnnnnnnnnnnnnnnnnnnnnnnnnnnnnnnnnnnnnnnnnnnnnnnnnnnnnnnnnnnnnnnnnnnnnnnnnnnnnnnnnnnnnnnnnnnnnnnnnnnnnnnnnnnnnnnnnnnnnnnnnnnnnnnnnnnnnnnnnnnnnnnnnnnnnnnnnnnnnnnnnnnnnnnnnnnnnnnnnnnnnnnnnnnnnnnnnnnnnnnnnnnnnnnnnnnnnnnnnnnnnnnnnnnnnnnnnnnnnnnnnnnnnnnnnnnnnnnnnnnnnnnnnnnnnnnnnnnnnnnnnnnnnnnnnnnnnnnnnnnnnnnnnnnnnnnnnnnnnnnnnnnnnnnnnnnnnnnnnnnnnnnnnnnnnnnnnnnnnnnnnnnnnnnnnnnnnnnnnnnnnnnnnnnnnnnnnnnnnnnnnnnnnnnnnnnnnnnnnnnnnnnnnnnnnnnnnnnnnnnnnnnnnnnnnnnnnnnnnnnnnnnnnnnnnnnnnnnnnnnnnnnnnnnnnnnnnnnnnnnnnnnnnnnnnnnnnnnnnnnnnnnnnnnnnnnnnnnnnnnnnnnnnnnnnnnnnnnnnnnnnnnnnnnnnnnnnnnnnnnnnnnnnnnnnnnnnnnnnnnnnnnnnnnnnnnnnnnnnnnnnnnnnnnnnnnnnnnnnnnnnnnnnnnnnnnnnnnnnnnnnnnnnnnnnnnnnnnnnnnnnnnnnnnnnnnnnnnnnnnnnnnnnnnnnnnnnnnnnnnnnnnnnnnnnnnnnnnnnnnnnnnnnnnnnnnnnnnnnnnnnnnnnnnnnnnnnnnnnnnnnnnnnnnnnnnnnnnnnnnnnnnnnnnnnnnnnnnnnnnnnnnnnnnnnnnnnnnnnnnnnnnnnnnnnnnnnnnnnnnnnnnnnnnnnnnnnnnnnnnnnnnnnnnnnnnnnnnnnnnnnnnnnnnnnnnnnnnnnnnnnnnnnnnnnnnnnnnnnnnnnnnnnnnnnnnnnnnnnnnnnnnnnnnnnnnnnnnnnnnnnnnnnnnnnnnnnnnnnnnnnnnnnnnnnnnnnnnnnnnnnnnnnnnnnnnnnnnnnnnnnnnnnnnnnnnnnnnnnnnnnnnnnnnnnnnnnnnnnnnnnnnnnnnnnnnnnnnnnnnnnnnnnnnnnnnnnnnnnnnnnnnnnnnnnnnnnnnnnnnnnnnnnnnnnnnnnnnnnnnnnnnnnnnnnnnnnnnnnnnnnnnnnnnnnnnnnnnnnnnnnnnnnnnnnnnnnnnnnnnnnnnnnnnnnnnnnnnnnnnnnnnnnnnnnnnnnnnnnnnnnnnnnnnnnnnnnnnnnnnnnnnnnnnnnnnnnnnnnnnnnnnnnnnnnnnnnnnnnnnnnnnnnnnnnnnnnnnnnnnnnnnnnnnnnnnnnnnnnnnnnnnnnnnnnnnnnnnnnnnnnnnnnnnnnnnnnnnnnnnnnnnnnnnnnnnnnnnnnnnnnnnnnnnnnnnnnnnnnnnnnnnnnnnnnnnnnnnnnnnnnnnnnnnnnnnnnnnnnnnnnnnnnnnnnnnnnnnnnnnnnnnnnnnnnnnnnnnnnnnnnnnnnnnnnnnnnnnnnnnnnnnnnnnnnnnnnnnnnnnnnnnnnnnnnnnnnnnnnnnnnnnnnnnnnnnnnnnnnnnnnnnnnnnnnnnnnnnnnnnnnnnnnnnnnnnnnnnnnnnnnnnnnnnnnnnnnnnnnnnnnnnnnnnnnnnnnnnnnnnnnnnnnnnnnnnnnnnnnnnnnnnnnnnnnnnnnnnnnnnnnnnnnnnnnnnnnnnnnnnnnnnnnnnnnnnnnnnnnnnnnnnnnnnnnnnnnnnnnnnnnnnnnnnnnnnnnnnnnnnnnnnnnnnnnnnnnnnnnnnnnnnnnnnnnnnnnnnnnnnnnnnnnnnnnnnnnnnnnnnnnnnnnnnnnnnnnnnnnnnnnnnnnnnnnnnnnnnnnnnnnnnnnnnnnnnnnnnnnnnnnnnnnnnnnnnnnnnnnnnnnnnnnnnnnnnnnnnnnnnnnnnnnnnnnnnnnnnnnnnnnnnnnnnnnnnnnnnnnnnnnnnnnnnnnnnnnnnnnnnnnnnnnnnnnnnnnnnnnnnnnnnnnnnnnnnnnnnnnnnnnnnnnnnnnnnnnnnnnnnnnnnnnnnnnnnnnnnnnnnnnnnnnnnnnnnnnnnnnnnnnnnnnnnnnnnnnnnnnnnnnnnnnnnnnnnnnnnnnnnnnnnnnnnnnnnnnnnnnnnnnnnnnnnnnnnnnnnnnnnnnnnnnnnnnnnnnnnnnnnnnnnnnnnnnnnnnnnnnnnnnnnnnnnnnnnnnnnnnnnnnnnnnnnnnnnnnnnnnnnnnnnnnnnnnnnnnnnnnnnnnnnnnnnnnnnnnnnnnnnnnnnnnnnnnnnnnnnnnnnnnnnnnnnnnnnnnnnnnnnnnnnnnnnnnnnnnnnnnnnnnnnnnnnnnnnnnnnnnnnnnnnnnnnnnnnnnnnnnnnnnnnnnnnnnnnnnnnnnnnnnnnnnnnnnnnnnnnnnnnnnnnnnnnnnnnnnnnnnnnnnnnnnnnnnnnnnnnnnnnnnnnnnnnnnnnnnnnnnnnnnnnnnnnnnnnnnnnnnnnnnnnnnnnnnnnnnnnnnnnnnnnnnnnnnnnnnnnnnnnnnnnnnnnnnnnnnnnnnnnnnnnnnnnnnnnnnnnnnnnnnnnnnnnnnnnnnnnnnnnnnnnnnnnnnnnnnnnnnnnnnnnnnnnnnnnnnnnnnnnnnnnnnnnnnnnnnnnnnnnnnnnnnnnnnnnnnnnnnnnnnnnnnnnnnnnnnnnnnnnnnnnnnnnnnnnnnnnnnnnnnnnnnnnnnnnnnnnnnnnnnnnnnnnnnnnnnnnnnnnnnnnnnnnnnnnnnnnnnnnnnnnnnnnnnnnnnnnnnnnnnnnnnnnnnnnnnnnnnnnnnnnnnnnnnnnnnnnnnnnnnnnnnnnnnnnnnnnnnnnnnnnnnnnnnnnnnnnnnnnnnnnnnnnnnnnnnnnnnnnnnnnnnnnnnnnnnnnnnnnnnnnnnnnnnnnnnnnnnnnnnnnnnnnnnnnnnnnnnnnnnnnnnnnnnnnnnnnnnnnnnnnnnnnnnnnnnnnnnnnnnnnnnnnnnnnnnnnnnnnnnnnnnnnnnnnnnnnnnnnnnnnnnnnnnnnnnnnnnnnnnnnnnnnnnnnnnnnnnnnnnnnnnnnnnnnnnnnnnnnnnnnnnnnnnnnnnnnnnnnnnnnnnnnnnnnnnnnnnnnnnnnnnnnnnnnnnnnnnnnnnnnnnnnnnnnnnnnnnnnnnnnnnnnnnnnnnnnnnnnnnnnnnnnnnnnnnnnnnnnnnnnnnnnnnnnnnnnnnnnnnnnnnnnnnnnnnnnnnnnnnnnnnnnnnnnnnnnnnnnnnnnnnnnnnnnnnnnnnnnnnnnnnnnnnnnnnnnnnnnnnnnnnnnnnnnnnnnnnnnnnnnnnnnnnnnnnnnnnnnnnnnnnnnnnnnnnnnnnnnnnnnnnnnnnnnnnnnnnnnnnnnnnnnnnnnnnnnnnnnnnnnnnnnnnnnnnnnnnnnnnnnnnnnnnnnnnnnnnnnnnnnnnnnnnnnnnnnnnnnnnnnnnnnnnnnnnnnnnnnnnnnnnnnnnnnnnnnnnnnnnnnnnnnnnnnnnnnnnnnnnnnnnnnnnnnnnnnnnnnnnnnnnnnnnnnnnnnnnnnnnnnnnnnnnnnnnnnnnnnnnnnnnnnnnnnnnnnnnnnnnnnnnnnnnnnnnnnnnnnnnnnnnnnnnnnnnnnnnnnnnnnnnnnnnnnnnnnnnnnnnnnnnnnnnnnnnnnnnnnnnnnnnnnnnnnnnnnnnnnnnnnnnnnnnnnnnnnnnnnnnnnnnnnnnnnnnnnnnnnnnnnnnnnnnnnnnnnnnnnnnnnnnnnnnnnnnnnnnnnnnnnnnnnnnnnnnnnnnnnnnnnnnnnnnnnnnnnnnnnnnnnnnnnnnnnnnnnnnnnnnnnnnnnnnnnnnnnnnnnnnnnnnnnnnnnnnnnnnnnnnnnnnnnnnnnnnnnnnnnnnnnnnnnnnnnnnnnnnnnnnnnnnnnnnnnnnnnnnnnnnnnnnnnnnnnnnnnnnnnnnnnnnnnnnnnnnnnnnnnnnnnnnnnnnnnnnnnnnnnnnnnnnnnnnnnnnnnnnnnnnnnnnnnnnnnnnnnnnnnnnnnnnnnnnnnnnnnnnnnnnnnnnnnnnnnnnnnnnnnnnnnnnnnnnnnnnnnnnnnnnnnnnnnnnnnnnnnnnnnnnnnnnnnnnnnnnnnnnnnnnnnnnnnnnnnnnnnnnnnnnnnnnnnnnnnnnnnnnnnnnnnnnnnnnnnnnnnnnnnnnnnnnnnnnnnnnnnnnnnnnnnnnnnnnnnnnnnnnnnnnnnnnnnnnnnnnnnnnnnnnnnnnnnnnnnnnnnnnnnnnnnnnnnnnnnnnnnnnnnnnnnnnnnnnnnnnnnnnnnnnnnnnnnnnnnnnnnnnnnnnnnnnnnnnnnnnnnnnnnnnnnnnnnnnnnnnnnnnnnnnnnnnnnnnnnnnnnnnnnnnnnnnnnnnnnnnnnnnnnnnnnnnnnnnnnnnnnnnnnnnnnnnnnnnnnnnnnnnnnnnnnnnnnnnnnnnnnnnnnnnnnnnnnnnnnnnnnnnnnnnnnnnnnnnnnnnnnnnnnnnnnnnnnnnnnnnnnnnnnnnnnnnnnnnnnnnnnnnnnnnnnnnnnnnnnnnnnnnnnnnnnnnnnnnnnnnnnnnnnnnnnnnnnnnnnnnnnnnnnnnnnnnnnnnnnnnnnnnnnnnnnnnnnnnnnnnnnnnnnnnnnnnnnnnnnnnnnnnnnnnnnnnnnnnnnnnnnnnnnnnnnnnnnnnnnnnnnnnnnnnnnnnnnnnnnnnnnnnnnnnnnnnnnnnnnnnnnnnnnnnnnnnnnnnnnnnnnnnnnnnnnnnnnnnnnnnnnnnnnnnnnnnnnnnnnnnnnnnnnnnnnnnnnnnnnnnnnnnnnnnnnnnnnnnnnnnnnnnnnnnnnnnnnnnnnnnnnnnnnnnnnnnnnnnnnnnnnnnnnnnnnnnnnnnnnnnnnnnnnnnnnnnnnnnnnnnnnnnnnnnnnnnnnnnnnnnnnnnnnnnnnnnnnnnnnnnnnnnnnnnnnnnnnnnnnnnnnnnnnnnnnnnnnnnnnnnnnnnnnnnnnnnnnnnnnnnnnnnnnnnnnnnnnnnnnnnnnnnnnnnnnnnnnnnnnnnnnnnnnnnnnnnnnnnnnnnnnnnnnnnnnnnnnnnnnnnnnnnnnnnnnnnnnnnnnnnnnnnnnnnnnnnnnnnnnnnnnnnnnnnnnnnnnnnnnnnnnnnnnnnnnnnnnnnnnnnnnnnnnnnnnnnnnnnnnnnnnnnnnnnnnnnnnnnnnnnnnnnnnnnnnnnnnnnnnnnnnnnnnnnnnnnnnnnnnnnnnnnnnnnnnnnnnnnnnnnnnnnnnnnnnnnnnnnnnnnnnnnnnnnnnnnnnnnnnnnnnnnnnnnnnnnnnnnnnnnnnnnnnnnnnnnnnnnnnnnnnnnnnnnnnnnnnnnnnnnnnnnnnnnnnnnnnnnnnnnnnnnnnnnnnnnnnnnnnnnnnnnnnnnnnnnnnnnnnnnnnnnnnnnnnnnnnnnnnnnnnnnnnnnnnnnnnnnnnnnnnnnnnnnnnnnnnnnnnnnnnnnnnnnnnnnnnnnnnnnnnnnnnnnnnnnnnnnnnnnnnnnnnnnnnnnnnnnnnnnnnnnnnnnnnnnnnnnnnnnnnnnnnnnnnnnnnnnnnnnnnnnnnnnnnnnnnnnnnnnnnnnnnnnnnnnnnnnnnnnnnnnnnnnnnnnnnnnnnnnnnnnnnnnnnnnnnnnnnnnnnnnnnnnnnnnnnnnnnnnnnnnnnnnnnnnnnnnnnnnnnnnnnnnnnnnnnnnnnnnnnnnnnnnnnnnnnnnnnnnnnnnnnnnnnnnnnnnnnnnnnnnnnnnnnnnnnnnnnnnnnnnnnnnnnnnnnnnnnnnnnnnnnnnnnnnnnnnnnnnnnnnnnnnnnnnnnnnnnnnnnnnnnnnnnnnnnnnnnnnnnnnnnnnnnnnnnnnnnnnnnnnnnnnnnnnnnnnnnnnnnnnnnnnnnnnnnnnnnnnnnnnnnnnnnnnnnnnnnnnnnnnnnnnnnnnnnnnnnnnnnnnnnnnnnnnnnnnnnnnnnnnnnnnnnnnnnnnnnnnnnnnnnnnnnnnnnnnnnnnnnnnnnnnnnnnnnnnnnnnnnnnnnnnnnnnnnnnnnnnnnnnnnnnnnnnnnnnnnnnnnnnnnnnnnnnnnnnnnnnnnnnnnnnnnnnnnnnnnnnnnnnnnnnnnnnnnnnnnnnnnnnnnnnnnnnnnnnnnnnnnnnnnnnnnnnnnnnnnnnnnnnnnnnnnnnnnnnnnnnnnnnnnnnnnnnnnnnnnnnnnnnnnnnnnnnnnnnnnnnnnnnnnnnnnnnnnnnnnnnnnnnnnnnnnnnnnnnnnnnnnnnnnnnnnnnnnnnnnnnnnnnnnnnnnnnnnnnnnnnnnnnnnnnnnnnnnnnnnnnnnnnnnnnnnnnnnnnnnnnnnnnnnnnnnnnnnnnnnnnnnnnnnnnnnnnnnnnnnnnnnnnnnnnnnnnnnnnnnnnnnnnnnnnnnnnnnnnnnnnnnnnnnnnnnnnnnnnnnnnnnnnnnnnnnnnnnnnnnnnnnnnnnnnnnnnnnnnnnnnnnnnnnnnnnnnnnnnnnnnnnnnnnnnnnnnnnnnnnnnnnnnnnnnnnnnnnnnnnnnnnnnnnnnnnnnnnnnnnnnnnnnnnnnnnnnnnnnnnnnnnnnnnnnnnnnnnnnnnnnnnnnnnnnnnnnnnnnnnnnnnnnnnnnnnnnnnnnnnnnnnnnnnnnnnnnnnnnnnnnnnnnnnnnnnnnnnnnnnnnnnnnnnnnnnnnnnnnnnnnnnnnnnnnnnnnnnnnnnnnnnnnnnnnnnnnnnnnnnnnnnnnnnnnnnnnnnnnnnnnnnnnnnnnnnnnnnnnnnnnnnnnnnnnnnnnnnnnnnnnnnnnnnnnnnnnnnnnnnnnnnnnnnnnnnnnnnnnnnnnnnnnnnnnnnnnnnnnnnnnnnnnnnnnnnnnnnnnnnnnnnnnnnnnnnnnnnnnnnnnnnnnnnnnnnnnnnnnnnnnnnnnnnnnnnnnnnnnnnnnnnnnnnnnnnnnnnnnnnnnnnnnnnnnnnnnnnnnnnnnnnnnnnnnnnnnnnnnnnnnnnnnnnnnnnnnnnnnnnnnnnnnnnnnnnnnnnnnnnnnnnnnnnnnnnnnnnnnnnnnnnnnnnnnnnnnnnnnnnnnnnnnnnnnnnnnnnnnnnnnnnnnnnnnnnnnnnnnnnnnnnnnnnnnnnnnnnnnnnnnnnnnnnnnnnnnnnnnnnnnnnnnnnnnnnnnnnnnnnnnnnnnnnnnnnnnnnnnnnnnnnnnnnnnnnnnnnnnnnnnnnnnnnnnnnnnnnnnnnnnnnnnnnnnnnnnnnnnnnnnnnnnnnnnnnnnnnnnnnnnnnnnnnnnnnnnnnnnnnnnnnnnnnnnnnnnnnnnnnnnnnnnnnnnnnnnnnnnnnnnnnnnnnnnnnnnnnnnnnnnnnnnnnnnnnnnnnnnnnnnnnnnnnnnnnnnnnnnnnnnnnnnnnnnnnnnnnnnnnnnnnnnnnnnnnnnnnnnnnnnnnnnnnnnnnnnnnnnnnnnnnnnnnnnnnnnnnnnnnnnnnnnnnnnnnnnnnnnnnnnnnnnnnnnnnnnnnnnnnnnnnnnnnnnnnnnnnnnnnnnnnnnnnnnnnnnnnnnnnnnnnnnnnnnnnnnnnnnnnnnnnnnnnnnnnnnnnnnnnnnnnnnnnnnnnnnnnnnnnnnnnnnnnnnnnnnnnnnnnnnnnnnnnnnnnnnnnnnnnnnnnnnnnnnnnnnnnnnnnnnnnnnnnnnnnnnnnnnnnnnnnnnnnnnnnnnnnnnnnnnnnnnnnnnnnnnnnnnnnnnnnnnnnnnnnnnnnnnnnnnnnnnnnnnnnnnnnnnnnnnnnnnnnnnnnnnnnnnnnnnnnnnnnnnnnnnnnnnnnnnnnnnnnnnnnnnnnnnnnnnnnnnnnnnnnnnnnnnnnnnnnnnnnnnnnnnnnnnnnnnnnnnnnnnnnnnnnnnnnnnnnnnnnnnnnnnnnnnnnnnnnnnnnnnnnnnnnnnnnnnnnnnnnnnnnnnnnnnnnnnnnnnnnnnnnnnnnnnnnnnnnnnnnnnnnnnnnnnnnnnnnnnnnnnnnnnnnnnnnnnnnnnnnnnnnnnnnnnnnnnnnnnnnnnnnnnnnnnnnnnnnnnnnnnnnnnnnnnnnnnnnnnnnnnnnnnnnnnnnnnnnnnnnnnnnnnnnnnnnnnnnnnnnnnnnnnnnnnnnnnnnnnnnnnnnnnnnnnnnnnnnnnnnnnnnnnnnnnnnnnnnnnnnnnnnnnnnnnnnnnnnnnnnnnnnnnnnnnnnnnnnnnnnnnnnnnnnnnnnnnnnnnnnnnnnnnnnnnnnnnnnnnnnnnnnnnnnnnnnnnnnnnnnnnnnnnnnnnnnnnnnnnnnnnnnnnnnnnnnnnnnnnnnnnnnnnnnnnnnnnnnnnnnnnnnnnnnnnnnnnnnnnnnnnnnnnnnnnnnnnnnnnnnnnnnnnnnnnnnnnnnnnnnnnnnnnnnnnnnnnnnnnnnnnnnnnnnnnnnnnnnnnnnnnnnnnnnnnnnnnnnnnnnnnnnnnnnnnnnnnnnnnnnnnnnnnnnnnnnnnnnnnnnnnnnnnnnnnnnnnnnnnnnnnnnnnnnnnnnnnnnnnnnnnnnnnnnnnnnnnnnnnnnnnnnnnnnnnnnnnnnnnnnnnnnnnnnnnnnnnnnnnnnnnnnnnnnnnnnnnnnnnnnnnnnnnnnnnnnnnnnnnnnnnnnnnnnnnnnnnnnnnnnnnnnnnnnnnnnnnnnnnnnnnnnnnnnnnnnnnnnnnnnnnnnnnnnnnnnnnnnnnnnnnnnnnnnnnnnnnnnnnnnnnnnnnnnnnnnnnnnnnnnnnnnnnnnnnnnnnnnnnnnnnnnnnnnnnnnnnnnnnnnnnnnnnnnnnnnnnnnnnnnnnnnnnnnnnnnnnnnnnnnnnnnnnnnnnnnnnnnnnnnnnnnnnnnnnnnnnnnnnnnnnnnnnnnnnnnnnnnnnnnnnnnnnnnnnnnnnnnnnnnnnnnnnnnnnnnnnnnnnnnnnnnnnnnnnnnnnnnnnnnnnnnnnnnnnnnnnnnnnnnnnnnnnnnnnnnnnnnnnnnnnnnnnnnnnnnnnnnnnnnnnnnnnnnnnnnnnnnnnnnnnnnnnnnnnnnnnnnnnnnnnnnnnnnnnnnnnnnnnnnnnnnnnnnnnnnnnnnnnnnnnnnnnnnnnnnnnnnnnnnnnnnnnnnnnnnnnnnnnnnnnnnnnnnnnnnnnnnnnnnnnnnnnnnnnnnnnnnnnnnnnnnnnnnnnnnnnnnnnnnnnnnnnnnnnnnnnnnnnnnnnnnnnnnnnnnnnnnnnnnnnnnnnnnnnnnnnnnnnnnnnnnnnnnnnnnnnnnnnnnnnnnnnnnnnnnnnnnnnnnnnnnnnnnnnnnnnnnnnnnnnnnnnnnnnnnnnnnnnnnnnnnnnnnnnnnnnnnnnnnnnnnnnnnnnnnnnnnnnnnnnnnnnnnnnnnnnnnnnnnnnnnnnnnnnnnnnnnnnnnnnnnnnnnnnnnnnnnnnnnnnnnnnnnnnnnnnnnnnnnnnnnnnnnnnnnnnnnnnnnnnnnnnnnnnnnnnnnnnnnnnnnnnnnnnnnnnnnnnnnnnnnnnnnnnnnnnnnnnnnnnnnnnnnnnnnnnnnnnnnnnnnnnnnnnnnnnnnnnnnnnnnnnnnnnnnnnnnnnnnnnnnnnnnnnnnnnnnnnnnnnnnnnnnnnnnnnnnnnnnnnnnnnnnnnnnnnnnnnnnnnnnnnnnnnnnnnnnnnnnnnnnnnnnnnnnnnnnnnnnnnnnnnnnnnnnnnnnnnnnnnnnnnnnnnnnnnnnnnnnnnnnnnnnnnnnnnnnnnnnnnnnnnnnnnnnnnnnnnnnnnnnnnnnnnnnnnnnnnnnnnnnnnnnnnnnnnnnnnnnnnnnnnnnnnnnnnnnnnnnnnnnnnnnnnnnnnnnnnnnnnnnnnnnnnnnnnnnnnnnnnnnnnnnnnnnnnnnnnnnnnnnnnnnnnnnnnnnnnnnnnnnnnnnnnnnnnnnnnnnnnnnnnnnnnnnnnnnnnnnnnnnnnnnnnnnnnnnnnnnnnnnnnnnnnnnnnnnnnnnnnnnnnnnnnnnnnnnnnnnnnnnnnnnnnnnnnnnnnnnnnnnnnnnnnnnnnnnnnnnnnnnnnnnnnnnnnnnnnnnnnnnnnnnnnnnnnnnnnnnnnnnnnnnnnnnnnnnnnnnnnnnnnnnnnnnnnnnnnnnnnnnnnnnnnnnnnnnnnnnnnnnnnnnnnnnnnnnnnnnnnnnnnnnnnnnnnnnnnnnnnnnnnnnnnnnnnnnnnnnnnnnnnnnnnnnnnnnnnnnnnnnnnnnnnnnnnnnnnnnnnnnnnnnnnnnnnnnnnnnnnnnnnnnnnnnnnnnnnnnnnnnnnnnnnnnnnnnnnnnnnnnnnnnnnnnnnnnnnnnnnnnnnnnnnnnnnnnnnnnnnnnnnnnnnnnnnnnnnnnnnnnnnnnnnnnnnnnnnnnnnnnnnnnnnnnnnnnnnnnnnnnnnnnnnnnnnnnnnnnnnnnnnnnnnnnnnnnnnnnnnnnnnnnnnnnnnnnnnnnnnnnnnnnnnnnnnnnnnnnnnnnnnnnnnnnnnnnnnnnnnnnnnnnnnnnnnnnnnnnnnnnnnnnnnnnnnnnnnnnnnnnnnnnnnnnnnnnnnnnnnnnnnnnnnnnnnnnnnnnnnnnnnnnnnnnnnnnnnnnnnnnnnnnnnnnnnnnnnnnnnnnnnnnnnnnnnnnnnnnnnnnnnnnnnnnnnnnnnnnnnnnnnnnnnnnnnnnnnnnnnnnnnnnnnnnnnnnnnnnnnnnnnnnnnnnnnnnnnnnnnnnnnnnnnnnnnnnnnnnnnnnnnnnnnnnnnnnnnnnnnnnnnnnnnnnnnnnnnnnnnnnnnnnnnnnnnnnnnnnnnnnnnnnnnnnnnnnnnnnnnnnnnnnnnnnnnnnnnnnnnnnnnnnnnnnnnnnnnnnnnnnnnnnnnnnnnnnnnnnnnnnnnnnnnnnnnnnnnnnnnnnnnnnnnnnnnnnnnnnnnnnnnnnnnnnnnnnnnnnnnnnnnnnnnnnnnnnnnnnnnnnnnnnnnnnnnnnnnnnnnnnnnnnnnnnnnnnnnnnnnnnnnnnnnnnnnnnnnnnnnnnnnnnnnnnnnnnnnnnnnnnnnnnnnnnnnnnnnnnnnnnnnnnnnnnnnnnnnnnnnnnnnnnnnnnnnnnnnnnnnnnnnnnnnnnnnnnnnnnnnnnnnnnnnnnnnnnnnnnnnnnnnnnnnnnnnnnnnnnnnnnnnnnnnnnnnnnnnnnnnnnnnnnnnnnnnnnnnnnnnnnnnnnnnnnnnnnnnnnnnnnnnnnnnnnnnnnnnnnnnnnnnnnnnnnnnnnnnnnnnnnnnnnnnnnnnnnnnnnnnnnnnnnnnnnnnnnnnnnnnnnnnnnnnnnnnnnnnnnnnnnnnnnnnnnnnnnnnnnnnnnnnnnnnnnnnnnnnnnnnnnnnnnnnnnnnnnnnnnnnnnnnnnnnnnnnnnnnnnnnnnnnnnnnnnnnnnnnnnnnnnnnnnnnnnnnnnnnnnnnnnnnnnnnnnnnnnnnnnnnnnnnnnnnnnnnnnnnnnnnnnnnnnnnnnnnnnnnnnnnnnnnnnnnnnnnnnnnnnnnnnnnnnnnnnnnnnnnnnnnnnnnnnnnnnnnnnnnnnnnnnnnnnnnnnnnnnnnnnnnnnnnnnnnnnnnnnnnnnnnnnnnnnnnnnnnnnnnnnnnnnnnnnnnnnnnnnnnnnnnnnnnnnnnnnnnnnnnnnnnnnnnnnnnnnnnnnnnnnnnnnnnnnnnnnnnnnnnnnnnnnnnnnnnnnnnnnnnnnnnnnnnnnnnnnnnnnnnnnnnnnnnnnnnnnnnnnnnnnnnnnnnnnnnnnnnnnnnnnnnnnnnnnnnnnnnnnnnnnnnnnnnnnnnnnnnnnnnnnnnnnnnnnnnnnnnnnnnnnnnnnnnnnnnnnnnnnnnnnnnnnnnnnnnnnnnnnnnnnnnnnnnnnnnnnnnnnnnnnnnnnnnnnnnnnnnnnnnnnnnnnnnnnnnnnnnnnnnnnnnnnnnnnnnnnnnnnnnnnnnnnnnnnnnnnnnnnnnnnnnnnnnnnnnnnnnnnnnnnnnnnnnnnnnnnnnnnnnnnnnnnnnnnnnnnnnnnnnnnnnnnnnnnnnnnnnnnnnnnnnnnnnnnnnnnnnnnnnnnnnnnnnnnnnnnnnnnnnnnnnnnnnnnnnnnnnnnnnnnnnnnnnnnnnnnnnnnnnnnnnnnnnnnnnnnnnnnnnnnnnnnnnnnnnnnnnnnnnnnnnnnnnnnnnnnnnnnnnnnnnnnnnnnnnnnnnnnnnnnnnnnnnnnnnnnnnnnnnnnnnnnnnnnnnnnnnnnnnnnnnnnnnnnnnnnnnnnnnnnnnnnnnnnnnnnnnnnnnnnnnnnnnnnnnnnnnnnnnnnnnnnnnnnnnnnnnnnnnnnnnnnnnnnnnnnnnnnnnnnnnnnnnnnnnnnnnnnnnnnnnnnnnnnnnnnnnnnnnnnnnnnnnnnnnnnnnnnnnnnnnnnnnnnnnnnnnnnnnnnnnnnnnnnnnnnnnnnnnnnnnnnnnnnnnnnnnnnnnnnnnnnnnnnnnnnnnnnnnnnnnnnnnnnnnnnnnnnnnnnnnnnnnnnnnnnnnnnnnnnnnnnnnnnnnnnnnnnnnnnnnnnnnnnnnnnnnnnnnnnnnnnnnnnnnnnnnnnnnnnnnnnnnnnnnnnnnnnnnnnnnnnnnnnnnnnnnnnnnnnnnnnnnnnnnnnnnnnnnnnnnnnnnnnnnnnnnnnnnnnnnnnnnnnnnnnnnnnnnnnnnnnnnnnnnnnnnnnnnnnnnnnnnnnnnnnnnnnnnnnnnnnnnnnnnnnnnnnnnnnnnnnnnnnnnnnnnnnnnnnnnnnnnnnnnnnnnnnnnnnnnnnnnnnnnnnnnnnnnnnnnnnnnnnnnnnnnnnnnnnnnnnnnnnnnnnnnnnnnnnnnnnnnnnnnnnnnnnnnnnnnnnnnnnnnnnnnnnnnnnnnnnnnnnnnnnnnnnnnnnnnnnnnnnnnnnnnnnnnnnnnnnnnnnnnnnnnnnnnnnnnnnnnnnnnnnnnnnnnnnnnnnnnnnnnnnnnnnnnnnnnnnnnnnnnnnnnnnnnnnnnnnnnnnnnnnnnnnnnnnnnnnnnnnnnnnnnnnnnnnnnnnnnnnnnnnnnnnnnnnnnnnnnnnnnnnnnnnnnnnnnnnnnnnnnnnnnnnnnnnnnnnnnnnnnnnnnnnnnnnnnnnnnnnnnnnnnnnnnnnnnnnnnnnnnnnnnnnnnnnnnnnnnnnnnnnnnnnnnnnnnnnnnnnnnnnnnnnnnnnnnnnnnnnnnnnnnnnnnnnnnnnnnnnnnnnnnnnnnnnnnnnnnnnnnnnnnnnnnnnnnnnnnnnnnnnnnnnnnnnnnnnnnnnnnnnnnnnnnnnnnnnnnnnnnnnnnnnnnnnnnnnnnnnnnnnnnnnnnnnnnnnnnnnnnnnnnnnnnnnnnnnnnnnnnnnnnnnnnnnnnnnnnnnnnnnnnnnnnnnnnnnnnnnnnnnnnnnnnnnnnnnnnnnnnnnnnnnnnnnnnnnnnnnnnnnnnnnnnnnnnnnnnnnnnnnnnnnnnnnnnnnnnnnnnnnnnnnnnnnnnnnnnnnnnnnnnnnnnnnnnnnnnnnnnnnnnnnnnnnnnnnnnnnnnnnnnnnnnnnnnnnnnnnnnnnnnnnnnnnnnnnnnnnnnnnnnnnnnnnnnnnnnnnnnnnnnnnnnnnnnnnnnnnnnnnnnnnnnnnnnnnnnnnnnnnnnnnnnnnnnnnnnnnnnnnnnnnnnnnnnnnnnnnnnnnnnnnnnnnnnnnnnnnnnnnnnnnnnnnnnnnnnnnnnnnnnnnnnnnnnnnnnnnnnnnnnnnnnnnnnnnnnnnnnnnnnnnnnnnnnnnnnnnnnnnnnnnnnnnnnnnnnnnnnnnnnnnnnnnnnnnnnnnnnnnnnnnnnnnnnnnnnnnnnnnnnnnnnnnnnnnnnnnnnnnnnnnnnnnnnnnnnnnnnnnnnnnnnnnnnnnnnnnnnnnnnnnnnnnnnnnnnnnnnnnnnnnnnnnnnnnnnnnnnnnnnnnnnnnnnnnnnnnnnnnnnnnnnnnnnnnnnnnnnnnnnnnnnnnnnnnnnnnnnnnnnnnnnnnnnnnnnnnnnnnnnnnnnnnnnnnnnnnnnnnnnnnnnnnnnnnnnnnnnnnnnnnnnnnnnnnnnnnnnnnnnnnnnnnnnnnnnnnnnnnnnnnnnnnnnnnnnnnnnnnnnnnnnnnnnnnnnnnnnnnnnnnnnnnnnnnnnnnnnnnnnnnnnnnnnnnnnnnnnnnnnnnnnnnnnnnnnnnnnnnnnnnnnnnnnnnnnnnnnnnnnnnnnnnnnnnnnnnnnnnnnnnnnnnnnnnnnnnnnnnnnnnnnnnnnnnnnnnnnnnnnnnnnnnnnnnnnnnnnnnnnnnnnnnnnnnnnnnnnnnnnnnnnnnnnnnnnnnnnnnnnnnnnnnnnnnnnnnnnnnnnnnnnnnnnnnnnnnnnnnnnnnnnnnnnnnnnnnnnnnnnnnnnnnnnnnnnnnnnnnnnnnnnnnnnnnnnnnnnnnnnnnnnnnnnnnnnnnnnnnnnnnnnnnnnnnnnnnnnnnnnnnnnnnnnnnnnnnnnnnnnnnnnnnnnnnnnnnnnnnnnnnnnnnnnnnnnnnnnnnnnnnnnnnnnnnnnnnnnnnnnnnnnnnnnnnnnnnnnnnnnnnnnnnnnnnnnnnnnnnnnnnnnnnnnnnnnnnnnnnnnnnnnnnnnnnnnnnnnnnnnnnnnnnnnnnnnnnnnnnnnnnnnnnnnnnnnnnnnnnnnnnnnnnnnnnnnnnnnnnnnnnnnnnnnnnnnnnnnnnnnnnnnnnnnnnnnnnnnnnnnnnnnnnnnnnnnnnnnnnnnnnnnnnnnnnnnnnnnnnnnnnnnnnnnnnnnnnnnnnnnnnnnnnnnnnnnnnnnnnnnnnnnnnnnnnnnnnnnnnnnnnnnnnnnnnnnnnnnnnnnnnnnnnnnnnnnnnnnnnnnnnnnnnnnnnnnnnnnnnnnnnnnnnnnnnnnnnnnnnnnnnnnnnnnnnnnnnnnnnnnnnnnnnnnnnnnnnnnnnnnnnnnnnnnnnnnnnnnnnnnnnnnnnnnnnnnnnnnnnnnnnnnnnnnnnnnnnnnnnnnnnnnnnnnnnnnnnnnnnnnnnnnnnnnnnnnnnnnnnnnnnnnnnnnnnnnnnnnnnnnnnnnnnnnnnnnnnnnnnnnnnnnnnnnnnnnnnnnnnnnnnnnnnnnnnnnnnnnnnnnnnnnnnnnnnnnnnnnnnnnnnnnnnnnnnnnnnnnnnnnnnnnnnnnnnnnnnnnnnnnnnnnnnnnnnnnnnnnnnnnnnnnnnnnnnnnnnnnnnnnnnnnnnnnnnnnnnnnnnnnnnnnnnnnnnnnnnnnnnnnnnnnnnnnnnnnnnnnnnnnnnnnnnnnnnnnnnnnnnnnnnnnnnnnnnnnnnnnnnnnnnnnnnnnnnnnnnnnnnnnnnnnnnnnnnnnnnnnnnnnnnnnnnnnnnnnnnnnnnnnnnnnnnnnnnnnnnnnnnnnnnnnnnnnnnnnnnnnnnnnnnnnnnnnnnnnnnnnnnnnnnnnnnnnnnnnnnnnnnnnnnnnnnnnnnnnnnnnnnnnnnnnnnnnnnnnnnnnnnnnnnnnnnnnnnnnnnnnnnnnnnnnnnnnnnnnnnnnnnnnnnnnnnnnnnnnnnnnnnnnnnnnnnnnnnnnnnnnnnnnnnnnnnnnnnnnnnnnnnnnnnnnnnnnnnnnnnnnnnnnnnnnnnnnnnnnnnnnnnnnnnnnnnnnnnnnnnnnnnnnnnnnnnnnnnnnnnnnnnnnnnnnnnnnnnnnnnnnnnnnnnnnnnnnnnnnnnnnnnnnnnnnnnnnnnnnnnnnnnnnnnnnnnnnnnnnnnnnnnnnnnnnnnnnnnnnnnnnnnnnnnnnnnnnnnnnnnnnnnnnnnnnnnnnnnnnnnnnnnnnnnnnnnnnnnnnnnnnnnnnnnnnnnnnnnnnnnnnnnnnnnnnnnnnnnnnnnnnnnnnnnnnnnnnnnnnnnnnnnnnnnnnnnnnnnnnnnnnnnnnnnnnnnnnnnnnnnnnnnnnnnnnnnnnnnnnnnnnnnnnnnnnnnnnnnnnnnnnnnnnnnnnnnnnnnnnnnnnnnnnnnnnnnnnnnnnnnnnnnnnnnnnnnnnnnnnnnnnnnnnnnnnnnnnnnnnnnnnnnnnnnnnnnnnnnnnnnnnnnnnnnnnnnnnnnnnnnnnnnnnnnnnnnnnnnnnnnnnnnnnnnnnnnnnnnnnnnnnnnnnnnnnnnnnnnnnnnnnnnnnnnnnnnnnnnnnnnnnnnnnnnnnnnnnnnnnnnnnnnnnnnnnnnnnnnnnnnnnnnnnnnnnnnnnnnnnnnnnnnnnnnnnnnnnnnnnnnnnnnnnnnnnnnnnnnnnnnnnnnnnnnnnnnnnnnnnnnnnnnnnnnnnnnnnnnnnnnnnnnnnnnnnnnnnnnnnnnnnnnnnnnnnnnnnnnnnnnnnnnnnnnnnnnnnnnnnnnnnnnnnnnnnnnnnnnnnnnnnnnnnnnnnnnnnnnnnnnnnnnnnnnnnnnnnnnnnnnnnnnnnnnnnnnnnnnnnnnnnnnnnnnnnnnnnnnnnnnnnnnnnnnnnnnnnnnnnnnnnnnnnnnnnnnnnnnnnnnnnnnnnnnnnnnnnnnnnnnnnnnnnnnnnnnnnnnnnnnnnnnnnnnnnnnnnnnnnnnnnnnnnnnnnnnnnnnnnnnnnnnnnnnnnnnnnnnnnnnnnnnnnnnnnnnnnnnnnnnnnnnnnnnnnnnnnnnnnnnnnnnnnnnnnnnnnnnnnnnnnnnnnnnnnnnnnnnnnnnnnnnnnnnnnnnnnnnnnnnnnnnnnnnnnnnnnnnnnnnnnnnnnnnnnnnnnnnnnnnnnnnnnnnnnnnnnnnnnnnnnnnnnnnnnnnnnnnnnnnnnnnnnnnnnnnnnnnnnnnnnnnnnnnnnnnnnnnnnnnnnnnnnnnnnnnnnnnnnnnnnnnnnnnnnnnnnnnnnnnnnnnnnnnnnnnnnnnnnnnnnnnnnnnnnnnnnnnnnnnnnnnnnnnnnnnnnnnnnnnnnnnnnnnnnnnnnnnnnnnnnnnnnnnnnnnnnnnnnnnnnnnnnnnnnnnnnnnnnnnnnnnnnnnnnnnnnnnnnnnnnnnnnnnnnnnnnnnnnnnnnnnnnnnnnnnnnnnnnnnnnnnnnnnnnnnnnnnnnnnnnnnnnnnnnnnnnnnnnnnnnnnnnnnnnnnnnnnnnnnnnnnnnnnnnnnnnnnnnnnnnnnnnnnnnnnnnnnnnnnnnnnnnnnnnnnnnnnnnnnnnnnnnnnnnnnnnnnnnnnnnnnnnnnnnnnnnnnnnnnnnnnnnnnnnnnnnnnnnnnnnnnnnnnnnnnnnnnnnnnnnnnnnnnnnnnnnnnnnnnnnnnnnnnnnnnnnnnnnnnnnnnnnnnnnnnnnnnnnnnnnnnnnnnnnnnnnnnnnnnnnnnnnnnnnnnnnnnnnnnnnnnnnnnnnnnnnnnnnnnnnnnnnnnnnnnnnnnnnnnnnnnnnnnnnnnnnnnnnnnnnnnnnnnnnnnnnnnnnnnnnnnnnnnnnnnnnnnnnnnnnnnnnnnnnnnnnnnnnnnnnnnnnnnnnnnnnnnnnnnnnnnnnnnnnnnnnnnnnnnnnnnnnnnnnnnnnnnnnnnnnnnnnnnnnnnnnnnnnnnnnnnnnnnnnnnnnnnnnnnnnnnnnnnnnnnnnnnnnnnnnnnnnnnnnnnnnnnnnnnnnnnnnnnnnnnnnnnnnnnnnnnnnnnnnnnnnnnnnnnnnnnnnnnnnnnnnnnnnnnnnnnnnnnnnnnnnnnnnnnnnnnnnnnnnnnnnnnnnnnnnnnnnnnnnnnnnnnnnnnnnnnnnnnnnnnnnnnnnnnnnnnnnnnnnnnnnnnnnnnnnnnnnnnnnnnnnnnnnnnnnnnnnnnnnnnnnnnnnnnnnnnnnnnnnnnnnnnnnnnnnnnnnnnnnnnnnnnnnnnnnnnnnnnnnnnnnnnnnnnnnnnnnnnnnnnnnnnnnnnnnnnnnnnnnnnnnnnnnnnnnnnnnnnnnnnnnnnnnnnnnnnnnnnnnnnnnnnnnnnnnnnnnnnnnnnnnnnnnnnnnnnnnnnnnnnnnnnnnnnnnnnnnnnnnnnnnnnnnnnnnnnnnnnnnnnnnnnnnnnnnnnnnnnnnnnnnnnnnnnnnnnnnnnnnnnnnnnnnnnnnnnnnnnnnnnnnnnnnnnnnnnnnnnnnnnnnnnnnnnnnnnnnnnnnnnnnnnnnnnnnnnnnnnnnnnnnnnnnnnnnnnnnnnnnnnnnnnnnnnnnnnnnnnnnnnnnnnnnnnnnnnnnnnnnnnnnnnnnnnnnnnnnnnnnnnnnnnnnnnnnnnnnnnnnnnnnnnnnnnnnnnnnnnnnnnnnnnnnnnnnnnnnnnnnnnnnnnnnnnnnnnnnnnnnnnnnnnnnnnnnnnnnnnnnnnnnnnnnnnnnnnnnnnnnnnnnnnnnnnnnnnnnnnnnnnnnnnnnnnnnnnnnnnnnnnnnnnnnnnnnnnnnnnnnnnnnnnnnnnnnnnnnnnnnnnnnnnnnnnnnnnnnnnnnnnnnnnnnnnnnnnnnnnnnnnnnnnnnnnnnnnnnnnnnnnnnnnnnnnnnnnnnnnnnnnnnnnnnnnnnnnnnnnnnnnnnnnnnnnnnnnnnnnnnnnnnnnnnnnnnnnnnnnnnnnnnnnnnnnnnnnnnnnnnnnnnnnnnnnnnnnnnnnnnnnnnnnnnnnnnnnnnnnnnnnnnnnnnnnnnnnnnnnnnnnnnnnnnnnnnnnnnnnnnnnnnnnnnnnnnnnnnnnnnnnnnnnnnnnnnnnnnnnnnnnnnnnnnnnnnnnnnnnnnnnnnnnnnnnnnnnnnnnnnnnnnnnnnnnnnnnnnnnnnnnnnnnnnnnnnnnnnnnnnnnnnnnnnnnnnnnnnnnnnnnnnnnnnnnnnnnnnnnnnnnnnnnnnnnnnnnnnnnnnnnnnnnnnnnnnnnnnnnnnnnnnnnnnnnnnnnnnnnnnnnnnnnnnnnnnnnnnnnnnnnnnnnnnnnnnnnnnnnnnnnnnnnnnnnnnnnnnnnnnnnnnnnnnnnnnnnnnnnnnnnnnnnnnnnnnnnnnnnnnnnnnnnnnnnnnnnnnnnnnnnnnnnnnnnnnnnnnnnnnnnnnnnnnnnnnnnnnnnnnnnnnnnnnnnnnnnnnnnnnnnnnnnnnnnnnnnnnnnnnnnnnnnnnnnnnnnnnnnnnnnnnnnnnnnnnnnnnnnnnnnnnnnnnnnnnnnnnnnnnnnnnnnnnnnnnnnnnnnnnnnnnnnnnnnnnnnnnnnnnnnnnnnnnnnnnnnnnnnnnnnnnnnnnnnnnnnnnnnnnnnnnnnnnnnnnnnnnnnnnnnnnnnnnnnnnnnnnnnnnnnnnnnnnnnnnnnnnnnnnnnnnnnnnnnnnnnnnnnnnnnnnnnnnnnnnnnnnnnnnnnnnnnnnnnnnnnnnnnnnnnnnnnnnnnnnnnnnnnnnnnnnnnnnnnnnnnnnnnnnnnnnnnnnnnnnnnnnnnnnnnnnnnnnnnnnnnnnnnnnnnnnnnnnnnnnnnnnnnnnnnnnnnnnnnnnnnnnnnnnnnnnnnnnnnnnnnnnnnnnnnnnnnnnnnnnnnnnnnnnnnnnnnnnnnnnnnnnnnnnnnnnnnnnnnnnnnnnnnnnnnnnnnnnnnnnnnnnnnnnnnnnnnnnnnnnnnnnnnnnnnnnnnnnnnnnnnnnnnnnnnnnnnnnnnnnnnnnnnnnnnnnnnnnnnnnnnnnnnnnnnnnnnnnnnnnnnnnnnnnnnnnnnnnnnnnnnnnnnnnnnnnnnnnnnnnnnnnnnnnnnnnnnnnnnnnnnnnnnnnnnnnnnnnnnnnnnnnnnnnnnnnnnnnnnnnnnnnnnnnnnnnnnnnnnnnnnnnnnnnnnnnnnnnnnnnnnnnnnnnnnnnnnnnnnnnnnnnnnnnnnnnnnnnnnnnnnnnnnnnnnnnnnnnnnnnnnnnnnnnnnnnnnnnnnnnnnnnnnnnnnnnnnnnnnnnnnnnnnnnnnnnnnnnnnnnnnnnnnnnnnnnnnnnnnnnnnnnnnnnnnnnnnnnnnnnnnnnnnnnnnnnnnnnnnnnnnnnnnnnnnnnnnnnnnnnnnnnnnnnnnnnnnnnnnnnnnnnnnnnnnnnnnnnnnnnnnnnnnnnnnnnnnnnnnnnnnnnnnnnnnnnnnnnnnnnnnnnnnnnnnnnnnnnnnnnnnnnnnnnnnnnnnnnnnnnnnnnnnnnnnnnnnnnnnnnnnnnnnnnnnnnnnnnnnnnnnnnnnnnnnnnnnnnnnnnnnnnnnnnnnnnnnnnnnnnnnnnnnnnnnnnnnnnnnnnnnnnnnnnnnnnnnnnnnnnnnnnnnnnnnnnnnnnnnnnnnnnnnnnnnnnnnnnnnnnnnnnnnnnnnnnnnnnnnnnnnnnnnnnnnnnnnnnnnnnnnnnnnnnnnnnnnnnnnnnnnnnnnnnnnnnnnnnnnnnnnnnnnnnnnnnnnnnnnnnnnnnnnnnnnnnnnnnnnnnnnnnnnnnnnnnnnnnnnnnnnnnnnnnnnnnnnnnnnnnnnnnnnnnnnnnnnnnnnnnnnnnnnnnnnnnnnnnnnnnnnnnnnnnnnnnnnnnnnnnnnnnnnnnnnnnnnnnnnnnnnnnnnnnnnnnnnnnnnnnnnnnnnnnnnnnnnnnnnnnnnnnnnnnnnnnnnnnnnnnnnnnnnnnnnnnnnnnnnnnnnnnnnnnnnnnnnnnnnnnnnnnnnnnnnnnnnnnnnnnnnnnnnnnnnnnnnnnnnnnnnnnnnnnnnnnnnnnnnnnnnnnnnnnnnnnnnnnnnnnnnnnnnnnnnnnnnnnnnnnnnnnnnnnnnnnnnnnnnnnnnnnnnnnnnnnnnnnnnnnnnnnnnnnnnnnnnnnnnnnnnnnnnnnnnnnnnnnnnnnnnnnnnnnnnnnnnnnnnnnnnnnnnnnnnnnnnnnnnnnnnnnnnnnnnnnnnnnnnnnnnnnnnnnnnnnnnnnnnnnnnnnnnnnnnnnnnnnnnnnnnnnnnnnnnnnnnnnnnnnnnnnnnnnnnnnnnnnnnnnnnnnnnnnnnnnnnnnnnnnnnnnnnnnnnnnnnnnnnnnnnnnnnnnnnnnnnnnnnnnnnnnnnnnnnnnnnnnnnnnnnnnnnnnnnnnnnnnnnnnnnnnnnnnnnnnnnnnnnnnnnnnnnnnnnnnnnnnnnnnnnnnnnnnnnnnnnnnnnnnnnnnnnnnnnnnnnnnnnnnnnnnnnnnnnnnnnnnnnnnnnnnnnnnnnnnnnnnnnnnnnnnnnnnnnnnnnnnnnnnnnnnnnnnnnnnnnnnnnnnnnnnnnnnnnnnnnnnnnnnnnnnnnnnnnnnnnnnnnnnnnnnnnnnnnnnnnnnnnnnnnnnnnnnnnnnnnnnnnnnnnnnnnnnnnnnnnnnnnnnnnnnnnnnnnnnnnnnnnnnnnnnnnnnnnnnnnnnnnnnnnnnnnnnnnnnnnnnnnnnnnnnnnnnnnnnnnnnnnnnnnnnnnnnnnnnnnnnnnnnnnnnnnnnnnnnnnnnnnnnnnnnnnnnnnnnnnnnnnnnnnnnnnnnnnnnnnnnnnnnnnnnnnnnnnnnnnnnnnnnnnnnnnnnnnnnnnnnnnnnnnnnnnnnnnnnnnnnnnnnnnnnnnnnnnnnnnnnnnnnnnnnnnnnnnnnnnnnnnnnnnnnnnnnnnnnnnnnnnnnnnnnnnnnnnnnnnnnnnnnnnnnnnnnnnnnnnnnnnnnnnnnnnnnnnnnnnnnnnnnnnnnnnnnnnnnnnnnnnnnnnnnnnnnnnnnnnnnnnnnnnnnnnnnnnnnnnnnnnnnnnnnnnnnnnnnnnnnnnnnnnnnnnnnnnnnnnnnnnnnnnnnnnnnnnnnnnnnnnnnnnnnnnnnnnnnnnnnnnnnnnnnnnnnnnnnnnnnnnnnnnnnnnnnnnnnnnnnnnnnnnnnnnnnnnnnnnnnnnnnnnnnnnnnnnnnnnnnnnnnnnnnnnnnnnnnnnnnnnnnnnnnnnnnnnnnnnnnnnnnnnnnnnnnnnnnnnnnnnnnnnnnnnnnnnnnnnnnnnnnnnnnnnnnnnnnnnnnnnnnnnnnnnnnnnnnnnnnnnnnnnnnnnnnnnnnnnnnnnnnnnnnnnnnnnnnnnnnnnnnnnnnnnnnnnnnnnnnnnnnnnnnnnnnnnnnnnnnnnnnnnnnnnnnnnnnnnnnnnnnnnnnnnnnnnnnnnnnnnnnnnnnnnnnnnnnnnnnnnnnnnnnnnnnnnnnnnnnnnnnnnnnnnnnnnnnnnnnnnnnnnnnnnnnnnnnnnnnnnnnnnnnnnnnnnnnnnnnnnnnnnnnnnnnnnnnnnnnnnnnnnnnnnnnnnnnnnnnnnnnnnnnnnnnnnnnnnnnnnnnnnnnnnnnnnnnnnnnnnnnnnnnnnnnnnnnnnnnnnnnnnnnnnnnnnnnnnnnnnnnnnnnnnnnnnnnnnnnnnnnnnnnnnnnnnnnnnnnnnnnnnnnnnnnnnnnnnnnnnnnnnnnnnnnnnnnnnnnnnnnnnnnnnnnnnnnnnnnnnnnnnnnnnnnnnnnnnnnnnnnnnnnnnnnnnnnnnnnnnnnnnnnnnnnnnnnnnnnnnnnnnnnnnnnnnnnnnnnnnnnnnnnnnnnnnnnnnnnnnnnnnnnnnnnnnnnnnnnnnnnnnnnnnnnnnnnnnnnnnnnnnnnnnnnnnnnnnnnnnnnnnnnnnnnnnnnnnnnnnnnnnnnnnnnnnnnnnnnnnnnnnnnnnnnnnnnnnnnnnnnnnnnnnnnnnnnnnnnnnnnnnnnnnnnnnnnnnnnnnnnnnnnnnnnnnnnnnnnnnnnnnnnnnnnnnnnnnnnnnnnnnnnnnnnnnnnnnnnnnnnnnnnnnnnnnnnnnnnnnnnnnnnnnnnnnnnnnnnnnnnnnnnnnnnnnnnnnnnnnnnnnnnnnnnnnnnnnnnnnnnnnnnnnnnnnnnnnnnnnnnnnnnnnnnnnnnnnnnnnnnnnnnnnnnnnnnnnnnnnnnnnnnnnnnnnnnnnnnnnnnnnnnnnnnnnnnnnnnnnnnnnnnnnnnnnnnnnnnnnnnnnnnnnnnnnnnnnnnnnnnnnnnnnnnnnnnnnnnnnnnnnnnnnnnnnnnnnnnnnnnnnnnnnnnnnnnnnnnnnnnnnnnnnnnnnnnnnnnnnnnnnnnnnnnnnnnnnnnnnnnnnnnnnnnnnnnnnnnnnnnnnnnnnnnnnnnnnnnnnnnnnnnnnnnnnnnnnnnnnnnnnnnnnnnnnnnnnnnnnnnnnnnnnnnnnnnnnnnnnnnnnnnnnnnnnnnnnnnnnnnnnnnnnnnnnnnnnnnnnnnnnnnnnnnnnnnnnnnnnnnnnnnnnnnnnnnnnnnnnnnnnnnnnnnnnnnnnnnnnnnnnnnnnnnnnnnnnnnnnnnnnnnnnnnnnnnnnnnnnnnnnnnnnnnnnnnnnnnnnnnnnnnnnnnnnnnnnnnnnnnnnnnnnnnnnnnnnnnnnnnnnnnnnnnnnnnnnnnnnnnnnnnnnnnnnnnnnnnnnnnnnnnnnnnnnnnnnnnnnnnnnnnnnnnnnnnnnnnnnnnnnnnnnnnnnnnnnnnnnnnnnnnnnnnnnnnnnnnnnnnnnnnnnnnnnnnnnnnnnnnnnnnnnnnnnnnnnnnnnnnnnnnnnnnnnnnnnnnnnnnnnnnnnnnnnnnnnnnnnnnnnnnnnnnnnnnnnnnnnnnnnnnnnnnnnnnnnnnnnnnnnnnnnnnnnnnnnnnnnnnnnnnnnnnnnnnnnnnnnnnnnnnnnnnnnnnnnnnnnnnnnnnnnnnnnnnnnnnnnnnnnnnnnnnnnnnnnnnnnnnnnnnnnnnnnnnnnnnnnnnnnnnnnnnnnnnnnnnnnnnnnnnnnnnnnnnnnnnnnnnnnnnnnnnnnnnnnnnnnnnnnnnnnnnnnnnnnnnnnnnnnnnnnnnnnnnnnnnnnnnnnnnnnnnnnnnnnnnnnnnnnnnnnnnnnnnnnnnnnnnnnnnnnnnnnnnnnnnnnnnnnnnnnnnnnnnnnnnnnnnnnnnnnnnnnnnnnnnnnnnnnnnnnnnnnnnnnnnnnnnnnnnnnnnnnnnnnnnnnnnnnnnnnnnnnnnnnnnnnnnnnnnnnnnnnnnnnnnnnnnnnnnnnnnnnnnnnnnnnnnnnnnnnnnnnnnnnnnnnnnnnnnnnnnnnnnnnnnnnnnnnnnnnnnnnnnnnnnnnnnnnnnnnnnnnnnnnnnnnnnnnnnnnnnnnnnnnnnnnnnnnnnnnnnnnnnnnnnnnnnnnnnnnnnnnnnnnnnnnnnnnnnnnnnnnnnnnnnnnnnnnnnnnnnnnnnnnnnnnnnnnnnnnnnnnnnnnnnnnnnnnnnnnnnnnnnnnnnnnnnnnnnnnnnnnnnnnnnnnnnnnnnnnnnnnnnnnnnnnnnnnnnnnnnnnnnnnnnnnnnnnnnnnnnnnnnnnnnnnnnnnnnnnnnnnnnnnnnnnnnnnnnnnnnnnnnnnnnnnnnnnnnnnnnnnnnnnnnnnnnnnnnnnnnnnnnnnnnnnnnnnnnnnnnnnnnnnnnnnnnnnnnnnnnnnnnnnnnnnnnnnnnnnnnnnnnnnnnnnnnnnnnnnnnnnnnnnnnnnnnnnnnnnnnnnnnnnnnnnnnnnnnnnnnnnnnnnnnnnnnnnnnnnnnnnnnnnnnnnnnnnnnnnnnnnnnnnnnnnnnnnnnnnnnnnnnnnnnnnnnnnnnnnnnnnnnnnnnnnnnnnnnnnnnnnnnnnnnnnnnnnnnnnnnnnnnnnnnnnnnnnnnnnnnnnnnnnnnnnnnnnnnnnnnnnnnnnnnnnnnnnnnnnnnnnnnnnnnnnnnnnnnnnnnnnnnnnnnnnnnnnnnnnnnnnnnnnnnnnnnnnnnnnnnnnnnnnnnnnnnnnnnnnnnnnnnnnnnnnnnnnnnnnnnnnnnnnnnnnnnnnnnnnnnnnnnnnnnnnnnnnnnnnnnnnnnnnnnnnnnnnnnnnnnnnnnnnnnnnnnnnnnnnnnnnnnnnnnnnnnnnnnnnnnnnnnnnnnnnnnnnnnnnnnnnnnnnnnnnnnnnnnnnnnnnnnnnnnnnnnnnnnnnnnnnnnnnnnnnnnnnnnnnnnnnnnnnnnnnnnnnnnnnnnnnnnnnnnnnnnnnnnnnnnnnnnnnnnnnnnnnnnnnnnnnnnnnnnnnnnnnnnnnnnnnnnnnnnnnnnnnnnnnnnnnnnnnnnnnnnnnnnnnnnnnnnnnnnnnnnnnnnnnnnnnnnnnnnnnnnnnnnnnnnnnnnnnnnnnnnnnnnnnnnnnnnnnnnnnnnnnnnnnnnnnnnnnnnnnnnnnnnnnnnnnnnnnnnnnnnnnnnnnnnnnnnnnnnnnnnnnnnnnnnnnnnnnnnnnnnnnnnnnnnnnnnnnnnnnnnnnnnnnnnnnnnnnnnnnnnnnnnnnnnnnnnnnnnnnnnnnnnnnnnnnnnnnnnnnnnnnnnnnnnnnnnnnnnnnnnnnnnnnnnnnnnnnnnnnnnnnnnnnnnnnnnnnnnnnnnnnnnnnnnnnnnnnnnnnnnnnnnnnnnnnnnnnnnnnnnnnnnnnnnnnnnnnnnnnnnnnnnnnnnnnnnnnnnnnnnnnnnnnnnnnnnnnnnnnnnnnnnnnnnnnnnnnnnnnnnnnnnnnnnnnnnnnnnnnnnnnnnnnnnnnnnnnnnnnnnnnnnnnnnnnnnnnnnnnnnnnnnnnnnnnnnnnnnnnnnnnnnnnnnnnnnnnnnnnnnnnnnnnnnnnnnnnnnnnnnnnnnnnnnnnnnnnnnnnnnnnnnnnnnnnnnnnnnnnnnnnnnnnnnnnnnnnnnnnnnnnnnnnnnnnnnnnnnnnnnnnnnnnnnnnnnnnnnnnnnnnnnnnnnnnnnnnnnnnnnnnnnnnnnnnnnnnnnnnnnnnnnnnnnnnnnnnnnnnnnnnnnnnnnnnnnnnnnnnnnnnnnnnnnnnnnnnnnnnnnnnnnnnnnnnnnnnnnnnnnnnnnnnnnnnnnnnnnnnnnnnnnnnnnnnnnnnnnnnnnnnnnnnnnnnnnnnnnnnnnnnnnnnnnnnnnnnnnnnnnnnnnnnnnnnnnnnnnnnnnnnnnnnnnnnnnnnnnnnnnnnnnnnnnnnnnnnnnnnnnnnnnnnnnnnnnnnnnnnnnnnnnnnnnnnnnnnnnnnnnnnnnnnnnnnnnnnnnnnnnnnnnnnnnnnnnnnnnnnnnnnnnnnnnnnnnnnnnnnnnnnnnnnnnnnnnnnnnnnnnnnnnnnnnnnnnnnnnnnnnnnnnnnnnnnnnnnnnnnnnnnnnnnnnnnnnnnnnnnnnnnnnnnnnnnnnnnnnnnnnnnnnnnnnnnnnnnnnnnnnnnnnnnnnnnnnnnnnnnnnnnnnnnnnnnnnnnnnnnnnnnnnnnnnnnnnnnnnnnnnnnnnnnnnnnnnnnnnnnnnnnnnnnnnnnnnnnnnnnnnnnnnnnnnnnnnnnnnnnnnnnnnnnnnnnnnnnnnnnnnnnnnnnnnnnnnnnnnnnnnnnnnnnnnnnnnnnnnnnnnnnnnnnnnnnnnnnnnnnnnnnnnnnnnnnnnnnnnnnnnnnnnnnnnnnnnnnnnnnnnnnnnnnnnnnnnnnnnnnnnnnnnnnnnnnnnnnnnnnnnnnnnnnnnnnnnnnnnnnnnnnnnnnnnnnnnnnnnnnnnnnnnnnnnnnnnnnnnnnnnnnnnnnnnnnnnnnnnnnnnnnnnnnnnnnnnnnnnnnnnnnnnnnnnnnnnnnnnnnnnnnnnnnnnnnnnnnnnnnnnnnnnnnnnnnnnnnnnnnnnnnnnnnnnnnnnnnnnnnnnnnnnnnnnnnnnnnnnnnnnnnnnnnnnnnnnnnnnnnnnnnnnnnnnnnnnnnnnnnnnnnnnnnnnnnnnnnnnnnnnnnnnnnnnnnnnnnnnnnnnnnnnnnnnnnnnnnnnnnnnnnnnnnnnnnnnnnnnnnnnnnnnnnnnnnnnnnnnnnnnnnnnnnnnnnnnnnnnnnnnnnnnnnnnnnnnnnnnnnnnnnnnnnnnnnnnnnnnnnnnnnnnnnnnnnnnnnnnnnnnnnnnnnnnnnnnnnnnnnnnnnnnnnnnnnnnnnnnnnnnnnnnnnnnnnnnnnnnnnnnnnnnnnnnnnnnnnnnnnnnnnnnnnnnnnnnnnnnnnnnnnnnnnnnnnnnnnnnnnnnnnnnnnnnnnnnnnnnnnnnnnnnnnnnnnnnnnnnnnnnnnnnnnnnnnnnnnnnnnnnnnnnnnnnnnnnnnnnnnnnnnnnnnnnnnnnnnnnnnnnnnnnnnnnnnnnnnnnnnnnnnnnnnnnnnnnnnnnnnnnnnnnnnnnnnnnnnnnnnnnnnnnnnnnnnnnnnnnnnnnnnnnnnnnnnnnnnnnnnnnnnnnnnnnnnnnnnnnnnnnnnnnnnnnnnnnnnnnnnnnnnnnnnnnnnnnnnnnnnnnnnnnnnnnnnnnnnnnnnnnnnnnnnnnnnnnnnnnnnnnnnnnnnnnnnnnnnnnnnnnnnnnnnnnnnnnnnnnnnnnnnnnnnnnnnnnnnnnnnnnnnnnnnnnnnnnnnnnnnnnnnnnnnnnnnnnnnnnnnnnnnnnnnnnnnnnnnnnnnnnnnnnnnnnnnnnnnnnnnnnnnnnnnnnnnnnnnnnnnnnnnnnnnnnnnnnnnnnnnnnnnnnnnnnnnnnnnnnnnnnnnnnnnnnnnnnnnnnnnnnnnnnnnnnnnnnnnnnnnnnnnnnnnnnnnnnnnnnnnnnnnnnnnnnnnnnnnnnnnnnnnnnnnnnnnnnnnnnnnnnnnnnnnnnnnnnnnnnnnnnnnnnnnnnnnnnnnnnnnnnnnnnnnnnnnnnnnnnnnnnnnnnnnnnnnnnnnnnnnnnnnnnnnnnnnnnnnnnnnnnnnnnnnnnnnnnnnnnnnnnnnnnnnnnnnnnnnnnnnnnnnnnnnnnnnnnnnnnnnnnnnnnnnnnnnnnnnnnnnnnnnnnnnnnnnnnnnnnnnnnnnnnnnnnnnnnnnnnnnnnnnnnnnnnnnnnnnnnnnnnnnnnnnnnnnnnnnnnnnnnnnnnnnnnnnnnnnnnnnnnnnnnnnnnnnnnnnnnnnnnnnnnnnnnnnnnnnnnnnnnnnnnnnnnnnnnnnnnnnnnnnnnnnnnnnnnnnnnnnnnnnnnnnnnnnnnnnnnnnnnnnnnnnnnnnnnnnnnnnnnnnnnnnnnnnnnnnnnnnnnnnnnnnnnnnnnnnnnnnnnnnnnnnnnnnnnnnnnnnnnnnnnnnnnnnnnnnnnnnnnnnnnnnnnnnnnnnnnnnnnnnnnnnnnnnnnnnnnnnnnnnnnnnnnnnnnnnnnnnnnnnnnnnnnnnnnnnnnnnnnnnnnnnnnnnnnnnnnnnnnnnnnnnnnnnnnnnnnnnnnnnnnnnnnnnnnnnnnnnnnnnnnnnnnnnnnnnnnnnnnnnnnnnnnnnnnnnnnnnnnnnnnnnnnnnnnnnnnnnnnnnnnnnnnnnnnnnnnnnnnnnnnnnnnnnnnnnnnnnnnnnnnnnnnnnnnnnnnnnnnnnnnnnnnnnnnnnnnnnnnnnnnnnnnnnnnnnnnnnnnnnnnnnnnnnnnnnnnnnnnnnnnnnnnnnnnnnnnnnnnnnnnnnnnnnnnnnnnnnnnnnnnnnnnnnnnnnnnnnnnnnnnnnnnnnnnnnnnnnnnnnnnnnnnnnnnnnnnnnnnnnnnnnnnnnnnnnnnnnnnnnnnnnnnnnnnnnnnnnnnnnnnnnnnnnnnnnnnnnnnnnnnnnnnnnnnnnnnnnnnnnnnnnnnnnnnnnnnnnnnnnnnnnnnnnnnnnnnnnnnnnnnnnnnnnnnnnnnnnnnnnnnnnnnnnnnnnnnnnnnnnnnnnnnnnnnnnnnnnnnnnnnnnnnnnnnnnnnnnnnnnnnnnnnnnnnnnnnnnnnnnnnnnnnnnnnnnnnnnnnnnnnnnnnnnnnnnnnnnnnnnnnnnnnnnnnnnnnnnnnnnnnnnnnnnnnnnnnnnnnnnnnnnnnnnnnnnnnnnnnnnnnnnnnnnnnnnnnnnnnnnnnnnnnnnnnnnnnnnnnnnnnnnnnnnnnnnnnnnnnnnnnnnnnnnnnnnnnnnnnnnnnnnnnnnnnnnnnnnnnnnnnnnnnnnnnnnnnnnnnnnnnnnnnnnnnnnnnnnnnnnnnnnnnnnnnnnnnnnnnnnnnnnnnnnnnnnnnnnnnnnnnnnnnnnnnnnnnnnnnnnnnnnnnnnnnnnnnnnnnnnnnnnnnnnnnnnnnnnnnnnnnnnnnnnnnnnnnnnnnnnnnnnnnnnnnnnnnnnnnnnnnnnnnnnnnnnnnnnnnnnnnnnnnnnnnnnnnnnnnnnnnnnnnnnnnnnnnnnnnnnnnnnnnnnnnnnnnnnnnnnnnnnnnnnnnnnnnnnnnnnnnnnnnnnnnnnnnnnnnnnnnnnnnnnnnnnnnnnnnnnnnnnnnnnnnnnnnnnnnnnnnnnnnnnnnnnnnnnnnnnnnnnnnnnnnnnnnnnnnnnnnnnnnnnnnnnnnnnnnnnnnnnnnnnnnnnnnnnnnnnnnnnnnnnnnnnnnnnnnnnnnnnnnnnnnnnnnnnnnnnnnnnnnnnnnnnnnnnnnnnnnnnnnnnnnnnnnnnnnnnnnnnnnnnnnnnnnnnnnnnnnnnnnnnnnnnnnnnnnnnnnnnnnnnnnnnnnnnnnnnnnnnnnnnnnnnnnnnnnnnnnnnnnnnnnnnnnnnnnnnnnnnnnnnnnnnnnnnnnnnnnnnnnnnnnnnnnnnnnnnnnnnnnnnnnnnnnnnnnnnnnnnnnnnnnnnnnnnnnnnnnnnnnnnnnnnnnnnnnnnnnnnnnnnnnnnnnnnnnnnnnnnnnnnnnnnnnnnnnnnnnnnnnnnnnnnnnnnnnnnnnnnnnnnnnnnnnnnnnnnnnnnnnnnnnnnnnnnnnnnnnnnnnnnnnnnnnnnnnnnnnnnnnnnnnnnnnnnnnnnnnnnnnnnnnnnnnnnnnnnnnnnnnnnnnnnnnnnnnnnnnnnnnnnnnnnnnnnnnnnnnnnnnnnnnnnnnnnnnnnnnnnnnnnnnnnnnnnnnnnnnnnnnnnnnnnnnnnnnnnnnnnnnnnnnnnnnnnnnnnnnnnnnnnnnnnnnnnnnnnnnnnnnnnnnnnnnnnnnnnnnnnnnnnnnnnnnnnnnnnnnnnnnnnnnnnnnnnnnnnnnnnnnnnnnnnnnnnnnnnnnnnnnnnnnnnnnnnnnnnnnnnnnnnnnnnnnnnnnnnnnnnnnnnnnnnnnnnnnnnnnnnnnnnnnnnnnnnnnnnnnnnnnnnnnnnnnnnnnnnnnnnnnnnnnnnnnnnnnnnnnnnnnnnnnnnnnnnnnnnnnnnnnnnnnnnnnnnnnnnnnnnnnnnnnnnnnnnnnnnnnnnnnnnnnnnnnnnnnnnnnnnnnnnnnnnnnnnnnnnnnnnnnnnnnnnnnnnnnnnnnnnnnnnnnnnnnnnnnnnnnnnnnnnnnnnnnnnnnnnnnnnnnnnnnnnnnnnnnnnnnnnnnnnnnnnnnnnnnnnnnnnnnnnnnnnnnnnnnnnnnnnnnnnnnnnnnnnnnnnnnnnnnnnnnnnnnnnnnnnnnnnnnnnnnnnnnnnnnnnnnnnnnnnnnnnnnnnnnnnnnnnnnnnnnnnnnnnnnnnnnnnnnnnnnnnnnnnnnnnnnnnnnnnnnnnnnnnnnnnnnnnnnnnnnnnnnnnnnnnnnnnnnnnnnnnnnnnnnnnnnnnnnnnnnnnnnnnnnnnnnnnnnnnnnnnnnnnnnnnnnnnnnnnnnnnnnnnnnnnnnnnnnnnnnnnnnnnnnnnnnnnnnnnnnnnnnnnnnnnnnnnnnnnnnnnnnnnnnnnnnnnnnnnnnnnnnnnnnnnnnnnnnnnnnnnnnnnnnnnnnnnnnnnnnnnnnnnnnnnnnnnnnnnnnnnnnnnnnnnnnnnnnnnnnnnnnnnnnnnnnnnnnnnnnnnnnnnnnnnnnnnnnnnnnnnnnnnnnnnnnnnnnnnnnnnnnnnnnnnnnnnnnnnnnnnnnnnnnnnnnnnnnnnnnnnnnnnnnnnnnnnnnnnnnnnnnnnnnnnnnnnnnnnnnnnnnnnnnnnnnnnnnnnnnnnnnnnnnnnnnnnnnnnnnnnnnnnnnnnnnnnnnnnnnnnnnnnnnnnnnnnnnnnnnnnnnnnnnnnnnnnnnnnnnnnnnnnnnnnnnnnnnnnnnnnnnnnnnnnnnnnnnnnnnnnnnnnnnnnnnnnnnnnnnnnnnnnnnnnnnnnnnnnnnnnnnnnnnnnnnnnnnnnnnnnnnnnnnnnnnnnnnnnnnnnnnnnnnnnnnnnnnnnnnnnnnnnnnnnnnnnnnnnnnnnnnnnnnnnnnnnnnnnnnnnnnnnnnnnnnnnnnnnnnnnnnnnnnnnnnnnnnnnnnnnnnnnnnnnnnnnnnnnnnnnnnnnnnnnnnnnnnnnnnnnnnnnnnnnnnnnnnnnnnnnnnnnnnnnnnnnnnnnnnnnnnnnnnnnnnnnnnnnnnnnnnnnnnnnnnnnnnnnnnnnnnnnnnnnnnnnnnnnnnnnnnnnnnnnnnnnnnnnnnnnnnnnnnnnnnnnnnnnnnnnnnnnnnnnnnnnnnnnnnnnnnnnnnnnnnnnnnnnnnnnnnnnnnnnnnnnnnnnnnnnnnnnnnnnnnnnnnnnnnnnnnnnnnnnnnnnnnnnnnnnnnnnnnnnnnnnnnnnnnnnnnnnnnnnnnnnnnnnnnnnnnnnnnnnnnnnnnnnnnnnnnnnnnnnnnnnnnnnnnnnnnnnnnnnnnnnnnnnnnnnnnnnnnnnnnnnnnnnnnnnnnnnnnnnnnnnnnnnnnnnnnnnnnnnnnnnnnnnnnnnnnnnnnnnnnnnnnnnnnnnnnnnnnnnnnnnnnnnnnnnnnnnnnnnnnnnnnnnnnnnnnnnnnnnnnnnnnnnnnnnnnnnnnnnnnnnnnnnnnnnnnnnnnnnnnnnnnnnnnnnnnnnnnnnnnnnnnnnnnnnnnnnnnnnnnnnnnnnnnnnnnnnnnnnnnnnnnnnnnnnnnnnnnnnnnnnnnnnnnnnnnnnnnnnnnnnnnnnnnnnnnnnnnnnnnnnnnnnnnnnnnnnnnnnnnnnnnnnnnnnnnnnnnnnnnnnnnnnnnnnnnnnnnnnnnnnnnnnnnnnnnnnnnnnnnnnnnnnnnnnnnnnnnnnnnnnnnnnnnnnnnnnnnnnnnnnnnnnnnnnnnnnnnnnnnnnnnnnnnnnnnnnnnnnnnnnnnnnnnnnnnnnnnnnnnnnnnnnnnnnnnnnnnnnnnnnnnnnnnnnnnnnnnnnnnnnnnnnnnnnnnnnnnnnnnnnnnnnnnnnnnnnnnnnnnnnnnnnnnnnnnnnnnnnnnnnnnnnnnnnnnnnnnnnnnnnnnnnnnnnnnnnnnnnnnnnnnnnnnnnnnnnnnnnnnnnnnnnnnnnnnnnnnnnnnnnnnnnnnnnnnnnnnnnnnnnnnnnnnnnnnnnnnnnnnnnnnnnnnnnnnnnnnnnnnnnnnnnnnnnnnnnnnnnnnnnnnnnnnnnnnnnnnnnnnnnnnnnnnnnnnnnnnnnnnnnnnnnnnnnnnnnnnnnnnnnnnnnnnnnnnnnnnnnnnnnnnnnnnnnnnnnnnnnnnnnnnnnnnnnnnnnnnnnnnnnnnnnnnnnnnnnnnnnnnnnnnnnnnnnnnnnnnnnnnnnnnnnnnnnnnnnnnnnnnnnnnnnnnnnnnnnnnnnnnnnnnnnnnnnnnnnnnnnnnnnnnnnnnnnnnnnnnnnnnnnnnnnnnnnnnnnnnnnnnnnnnnnnnnnnnnnnnnnnnnnnnnnnnnnnnnnnnnnnnnnnnnnnnnnnnnnnnnnnnnnnnnnnnnnnnnnnnnnnnnnnnnnnnnnnnnnnnnnnnnnnnnnnnnnnnnnnnnnnnnnnnnnnnnnnnnnnnnnnnnnnnnnnnnnnnnnnnnnnnnnnnnnnnnnnnnnnnnnnnnnnnnnnnnnnnnnnnnnnnnnnnnnnnnnnnnnnnnnnnnnnnnnnnnnnnnnnnnnnnnnnnnnnnnnnnnnnnnnnnnnnnnnnnnnnnnnnnnnnnnnnnnnnnnnnnnnnnnnnnnnnnnnnnnnnnnnnnnnnnnnnnnnnnnnnnnnnnnnnnnnnnnnnnnnnnnnnnnnnnnnnnnnnnnnnnnnnnnnnnnnnnnnnnnnnnnnnnnnnnnnnnnnnnnnnnnnnnnnnnnnnnnnnnnnnnnnnnnnnnnnnnnnnnnnnnnnnnnnnnnnnnnnnnnnnnnnnnnnnnnnnnnnnnnnnnnnnnnnnnnnnnnnnnnnnnnnnnnnnnnnnnnnnnnnnnnnnnnnnnnnnnnnnnnnnnnnnnnnnnnnnnnnnnnnnnnnnnnnnnnnnnnnnnnnnnnnnnnnnnnnnnnnnnnnnnnnnnnnnnnnnnnnnnnnnnnnnnnnnnnnnnnnnnnnnnnnnnnnnnnnnnnnnnnnnnnnnnnnnnnnnnnnnnnnnnnnnnnnnnnnnnnnnnnnnnnnnnnnnnnnnnnnnnnnnnnnnnnnnnnnnnnnnnnnnnnnnnnnnnnnnnnnnnnnnnnnnnnnnnnnnnnnnnnnnnnnnnnnnnnnnnnnnnnnnnnnnnnnnnnnnnnnnnnnnnnnnnnnnnnnnnnnnnnnnnnnnnnnnnnnnnnnnnnnnnnnnnnnnnnnnnnnnnnnnnnnnnnnnnnnnnnnnnnnnnnnnnnnnnnnnnnnnnnnnnnnnnnnnnnnnnnnnnnnnnnnnnnnnnnnnnnnnnnnnnnnnnnnnnnnnnnnnnnnnnnnnnnnnnnnnnnnnnnnnnnnnnnnnnnnnnnnnnnnnnnnnnnnnnnnnnnnnnnnnnnnnnnnnnnnnnnnnnnnnnnnnnnnnnnnnnnnnnnnnnnnnnnnnnnnnnnnnnnnnnnnnnnnnnnnnnnnnnnnnnnnnnnnnnnnnnnnnnnnnnnnnnnnnnnnnnnnnnnnnnnnnnnnnnnnnnnnnnnnnnnnnnnnnnnnnnnnnnnnnnnnnnnnnnnnnnnnnnnnnnnnnnnnnnnnnnnnnnnnnnnnnnnnnnnnnnnnnnnnnnnnnnnnnnnnnnnnnnnnnnnnnnnnnnnnnnnnnnnnnnnnnnnnnnnnnnnnnnnnnnnnnnnnnnnnnnnnnnnnnnnnnnnnnnnnnnnnnnnnnnnnnnnnnnnnnnnnnnnnnnnnnnnnnnnnnnnnnnnnnnnnnnnnnnnnnnnnnnnnnnnnnnnnnnnnnnnnnnnnnnnnnnnnnnnnnnnnnnnnnnnnnnnnnnnnnnnnnnnnnnnnnnnnnnnnnnnnnnnnnnnnnnnnnnnnnnnnnnnnnnnnnnnnnnnnnnnnnnnnnnnnnnnnnnnnnnnnnnnnnnnnnnnnnnnnnnnnnnnnnnnnnnnnnnnnnnnnnnnnnnnnnnnnnnnnnnnnnnnnnnnnnnnnnnnnnnnnnnnnnnnnnnnnnnnnnnnnnnnnnnnnnnnnnnnnnnnnnnnnnnnnnnnnnnnnnnnnnnnnnnnnnnnnnnnnnnnnnnnnnnnnnnnnnnnnnnnnnnnnnnnnnnnnnnnnnnnnnnnnnnnnnnnnnnnnnnnnnnnnnnnnnnnnnnnnnnnnnnnnnnnnnnnnnnnnnnnnnnnnnnnnnnnnnnnnnnnnnnnnnnnnnnnnnnnnnnnnnnnnnnnnnnnnnnnnnnnnnnnnnnnnnnnnnnnnnnnnnnnnnnnnnnnnnnnnnnnnnnnnnnnnnnnnnnnnnnnnnnnnnnnnnnnnnnnnnnnnnnnnnnnnnnnnnnnnnnnnnnnnnnnnnnnnnnnnnnnnnnnnnnnnnnnnnnnnnnnnnnnnnnnnnnnnnnnnnnnnnnnnnnnnnnnnnnnnnnnnnnnnnnnnnnnnnnnnnnnnnnnnnnnnnnnnnnnnnnnnnnnnnnnnnnnnnnnnnnnnnnnnnnnnnnnnnnnnnnnnnnnnnnnnnnnnnnnnnnnnnnnnnnnnnnnnnnnnnnnnnnnnnnnnnnnnnnnnnnnnnnnnnnnnnnnnnnnnnnnnnnnnnnnnnnnnnnnnnnnnnnnnnnnnnnnnnnnnnnnnnnnnnnnnnnnnnnnnnnnnnnnnnnnnnnnnnnnnnnnnnnnnnnnnnnnnnnnnnnnnnnnnnnnnnnnnnnnnnnnnnnnnnnnnnnnnnnnnnnnnnnnnnnnnnnnnnnnnnnnnnnnnnnnnnnnnnnnnnnnnnnnnnnnnnnnnnnnnnnnnnnnnnnnnnnnnnnnnnnnnnnnnnnnnnnnnnnnnnnnnnnnnnnnnnnnnnnnnnnnnnnnnnnnnnnnnnnnnnnnnnnnnnnnnnnnnnnnnnnnnnnnnnnnnnnnnnnnnnnnnnnnnnnnnnnnnnnnnnnnnnnnnnnnnnnnnnnnnnnnnnnnnnnnnnnnnnnnnnnnnnnnnnnnnnnnnnnnnnnnnnnnnnnnnnnnnnnnnnnnnnnnnnnnnnnnnnnnnnnnnnnnnnnnnnnnnnnnnnnnnnnnnnnnnnnnnnnnnnnnnnnnnnnnnnnnnnnnnnnnnnnnnnnnnnnnnnnnnnnnnnnnnnnnnnnnnnnnnnnnnnnnnnnnnnnnnnnnnnnnnnnnnnnnnnnnnnnnnnnnnnnnnnnnnnnnnnnnnnnnnnnnnnnnnnnnnnnnnnnnnnnnnnnnnnnnnnnnnnnnnnnnnnnnnnnnnnnnnnnnnnnnnnnnnnnnnnnnnnnnnnnnnnnnnnnnnnnnnnnnnnnnnnnnnnnnnnnnnnnnnnnnnnnnnnnnnnnnnnnnnnnnnnnnnnnnnnnnnnnnnnnnnnnnnnnnnnnnnnnnnnnnnnnnnnnnnnnnnnnnnnnnnnnnnnnnnnnnnnnnnnnnnnnnnnnnnnnnnnnnnnnnnnnnnnnnnnnnnnnnnnnnnnnnnnnnnnnnnnnnnnnnnnnnnnnnnnnnnnnnnnnnnnnnnnnnnnnnnnnnnnnnnnnnnnnnnnnnnnnnnnnnnnnnnnnnnnnnnnnnnnnnnnnnnnnnnnnnnnnnnnnnnnnnnnnnnnnnnnnnnnnnnnnnnnnnnnnnnnnnnnnnnnnnnnnnnnnnnnnnnnnnnnnnnnnnnnnnnnnnnnnnnnnnnnnnnnnnnnnnnnnnnnnnnnnnnnnnnnnnnnnnnnnnnnnnnnnnnnnnnnnnnnnnnnnnnnnnnnnnnnnnnnnnnnnnnnnnnnnnnnnnnnnnnnnnnnnnnnnnnnnnnnnnnnnnnnnnnnnnnnnnnnnnnnnnnnnnnnnnnnnnnnnnnnnnnnnnnnnnnnnnnnnnnnnnnnnnnnnnnnnnnnnnnnnnnnnnnnnnnnnnnnnnnnnnnnnnnnnnnnnnnnnnnnnnnnnnnnnnnnnnnnnnnnnnnnnnnnnnnnnnnnnnnnnnnnnnnnnnnnnnnnnnnnnnnnnnnnnnnnnnnnnnnnnnnnnnnnnnnnnnnnnnnnnnnnnnnnnnnnnnnnnnnnnnnnnnnnnnnnnnnnnnnnnnnnnnnnnnnnnnnnnnnnnnnnnnnnnnnnnnnnnnnnnnnnnnnnnnnnnnnnnnnnnnnnnnnnnnnnnnnnnnnnnnnnnnnnnnnnnnnnnnnnnnnnnnnnnnnnnnnnnnnnnnnnnnnnnnnnnnnnnnnnnnnnnnnnnnnnnnnnnnnnnnnnnnnnnnnnnnnnnnnnnnnnnnnngaattcctgagcatcccggggatcccagggccggtccaggtacagggaggtgggttgtctactgcgcatgtgcgggtttccaggcagcagcctgggttttctgactagcccaggcggagctctcatccctttttccccgcgttcttcagtcgggttggcggagacctcagtccgcgaaacactgggccgtggcagaagccaggccagttctcctttctgcggctcgactcctctgcctcttcgctcaccatcacttgccaacccctgtcccatcagcctccttgccagcaccatggagggccttgcaactaaatgtagacctgagaccccgtgcaaaccggggtgctgcccattccaggcaaaagggaaggcaggcagagatgaggacaggaacggagagagagtgagatggaaggatggagctaggagaggatgggtggaaggagggaccccggaagggagagaaagaggaagggagaaagggaggaaaaacccgggggagggagggaagaacagagggaaggatggaccgagggacaaaaggagcaagaaacagagaacggaaggcagagacaaaaacggtcttatgcctccagagccaacaggacccagcactccaggaaaatgttgggttcccattgcgggctaagtgctgggcccacagccccgttggccggcggggcgatgagcggccctctggatcgccagcctgggttacttcatcccggagcaattcagaccaattccgtttccgaaggaatgagcgaattccccggaaagcaatgagttgagactcaggtggttgtctgcttttcatccacatggttcacagatgacatatccccacgttgagccctgcaacagagctcgaggtggatagtcccatccacacaggagtcacactgaggccaactgaagcgtgattctggattccacgttctttgctctctgcaaaggtgcctgttgctcaagtttctgccccccgaaagcatgaccatgttgactgtttgtttcccgagctctgtggggccccggaaacttccaggaatgcgtggaagaccagcatcatgtcggtgctctcctttccagttttcaaacaggctatattggagactccccactttgcaggaaacaagaatccatcgtcaggccgtgatgtacgggatgtttcttttctctgtggtttcgctctcgttgtctacgtgaaaatgaacaagatccacacaactgcgtgtgtgagactatcacggcaactgtgacacccaggcgctggcaatagagttggcagcctgatcccgggacaaaggtactgatggacatccagatactccccgccacaatcactggcaaacccactcccaaacacacagacgcacaggggcgcacgcgcgggaacacaagcacacacacagacacacaaagacacagacaacttgaaggagagcaagggacagagggatggagagatagaaacggaaggagagagagaaacagccatcgagagagagatagagaggaactggggagattgagagagagagagagagagagcaaggtggagaaggaagcagagaaagggaaagggtgagggagctacagagggagagcaacagagccttggagagggaggctctatctggtagacagggtcccctttgccagggtagggtggagggtgactgggccgggctggaacaggggggcagggccgccactgcgggaaaatcaacggagccctgagacgtgtttttacttggattggttggtggccttgggggtgcgtttcgtagcgtcattctttttttggctcctccctgtcctcttggtgctgtgggccctgaaagttgtagagtgcgcccctcactgtggcaggagcagtggcgctgagcgtgcccacgggccgcggcttgggtctctcgttttccgggtggtatggccttagacaatggcagtggcgcctggctggcccaagagcccggtccagctacgcccgcctgattccaggcgtcaccaccaacccggggccgcgaggctgggatcaggcaccccggagccgcttgcccgtggccgggctgctctccccctctacgcccaagcaccaccagtcgccgcgctgcgctttctgccgacctcccagagcgtccagctgtcgctggcggccagaccacgcgcgagacctacgcggtgccagaggcctccatcccctgccagggctctggactctccatgcgaccaccctctcgctgacactccaggccttccccaggctctggagctccagagcttccaacacctggggcccgctcaggacggggtgtgctccgaggcgtcagggcccagggcccagggtcctggggtaccctctggtcctccgccttgccgcggaaaaattattttggattcctcgccgcccctcctgcaaggccccctcttgccccacacacccagagccgccagggctgcccaggggctaacagccggcccagccccgcgggccctttttctcacaacgcccacaccatcgtcgcttgttccgacgaggacccgccgtggccaacggggcaggaaggctctgctttgccccgtgctagcactagagccccggcagcctcatcccgggaaagaggggctgacggacacccagacacaccccaccactaccacgagcaaaccccccctgacacacacacggatagacacgggtgcacgcgcgcggacacacacacaccacacccgtgcacacacacacggacacacaaagacacagacacagagagcttgaagggagaccacccctcatattgtcttatgcccaatttctgcctccaaagaaagaagtaaaatctaaaaggcagaaatgaaatccacaggcagacagccctgcgccacaccctgggcctggtagttaaagatcgacccctgacctactcgattatgttatctatagattacagacattatatagaaaagcactgtgaaaatccctgtcctgttttgttctgatctaattaccggtgcatgcagacccccgtcccgtaccctctgcttcctcaatccatcacgaccccctcacacggacccccttagagttgtaagcccttaagagggacaggaattgcttactcagagagctaggtttttggagacgtgagtctgcctatgctcccagctgaataaagccctcccttctacaactcggtgtctgaggggttttgtctgcagctcctcctgctacagaaggagagcaagggagagagggatggagaaatagaaccagagggacagagagacagcgatagagagagagacagagaagggggaggcgagacagaggggggaagagagagccccacagtagagagcgaagtggaggtggaagtagagaaagggagagggtgagggagttgtagagcgacagcgacagagccttggagagggaggctctgctcaggtagacagggcacctttcagcaggccggggtggggtggagggtgcttgggccgggctagaacagggggtcagggccccccacccaggaaaaccaacggagccctgagacgtgtgtgtttttttttcttgaattggttggttgctttgggggtgcgtttcataaggtccttcctttgtttgcttccttctgtctccttggtgcggtgggccctgacatttgtagagtgtgctcgtttgtctggcgggagccttggcgccgagagtgtccatggggcgaggcctaggtctctctcctgtcctcaggactggagttcacacgaagtctgtggcattgggaaagcgggtgcacagggacggatttcctcgtggctggcgaagacaatgtccttcccctggggaaagcagcccacgggttctggagtggaggtcttcgctggggtctgtgggacccgctgtccctgcccgtcccttcccccggcttggacggttgccgcgtcactggaagaatgaatagaattgcctgggagtccgggaagcgtgaagacacccgggacctcagggaacccgcgccttcgccctcggggtcggtccagtcccgccagggttggagccaggctcctggtggggctgctgcgagtgggaaaaggtgggatgctgctgcctgtcggtgctgcagcagcggatcttcaggacgaggtcctgggcttcggctggggcgcgggggtggtcaagggggagcagaggcggggggcagttgggaagcacggagacaaaagggggaaagagggagggagcaggaagccaaaagcctacggtacccgttattaccaggcggaatcccatccgggtactaaccaggcccgaccctgcttagcttcaacagatcagaggcgagagggcccgttcagggtggtgtggcctagacgccagcagcggcgcctggctgccccaagagccgggcccagccacgcccgcacgactccaggcgtcaccgccaccccggggccgcgggtctcggatccgggacccccagagacgctcgcccgtgcctccgggcagctgtctccctctacacccgagcaccgccggcctcccagagagtcccgccgtcaccggcggtcaggcctggcgcaggaccaatgtggcgccgccctgctgttgctggtgggcgccggaggcctcagtcccctgcctaagcttccggctctcagggcggcctcccttccgcccacgctccagtccttccgcgagctcccgagctctggagcttccaccacatctgccggctcaggacgggtcgtgctcatcccttaactttttaactttttgttgtttctatttatattttattgtgctatgtcttgaaatgttgtcgtagttattacttttgattggatattatttagtattcctaccttgaataagagtagtttacacaccacccatctatagtgttataatattctgttttgttttgtatcctattagcagtgaggattttttttttacttttaggtgatcatttattgctcgttaatgtccttttcttcctgattgaagtactccctttagcattcctttaggacaggtatggtattcataaaatacttcagcttttgtttgtctgaaaaagtcagtattctttttatttgaagaaaattttcactgtatattctattctaaggtaaaagtttttttcctttagtactttaaatatttattgcttctctttcctggctagtagagtttccactgtaaagtctgctgccagacatgttggagctccccagtatgttatttgtttcttttctctttcttcctttagaacttgtctttatctttgacttttggaagatctattgaatgctttgaagtagtcttttttgggttaaatctgcttaatgttctataacatttttgtagttggatatggatatctttctctaggtttggaaagttctctgttattatccctttgaataaatttttctacccctgcccctttctctacatcttctttaaaaccaataactcttagatctgtctttctgaggctattttctagatcctcccctgcctctttctctacatcttctttaaaacaaataattcttagatctgtctttgtgaggctattttctagatcctgtcggcatgattggttgtttttattctttttcttttgtctcttatatgtattttcaaagagcctgtcttcaagctcactatttcttcgcttgatccattctgctattacatggctctaatgcattcttcagcatgccaattgcatttttcagctcagaatttctgcttaatttgctgtaactattccaatctctttgttgagtttagctgataaaatttggaatttctttactttgttatcttaaatttgtttcagttttttttttttaaatacagctcttttgaattctccatctgaaacatcacatatctctttttctccaggatttgtccccagtgccttatttagttcacttggtgaattcatgttttcctggatggtgttgatgctagtagatgttcttcagggtctggacattaaaatcttgggcatgcagcactatatgagaggtttaaaaaataaaatttaaagagagaaaaggttagtatttattgtagtcttcactgtctgggcttatttgtagctgtctttcttgggaaggcttttcacatatttgaaaagagttgggtgttgtggtctaagacatatctgctttacgggggaccttatacccaataatgctgtaattcttccagactcagagaagtaccaccttgacagccttcaacaaaatccaggagaattttctggtttactagccagagactctttttccctacccttattttctctcaaagatacagagtctttctctctgttctaagccacctaaagctgggagaagaaagacacaagcacccctggctaccaccactatgactgtcctggatcagacctgaagctagcacagcacgggtcttgctcaagtcctgctgcatgcactttctgacgactgcctatgtacactcaaggcctttggtctctacaattagcaggtggcaaagccagacaggcctgtgttctttcctttagggcagtgagatccctcagtccctggctgggtccagaagtgccattcagaagtcagggctttggccactttttaatagggttttttttgtttttctcttgtaaatttaagttccttatattgaatattagatctttgtcagatacatagtttgtaaatattttttcctcattctataggttgtttgttcactctattgataatttcttttgctgagcagaagcttttaagtttaattagatcccacttgtcaatagttttatttgttgtttttggtgtctttatcatgaaatctttgcccctttctatgtccaggatggtattgtctaggttgtcttccagggcttttatagttttgggttttcaatttaagtatttaatccatcttgagttgatttttgtgtatggtataaggaagaagtccaccttcaatcttctgcatatggctagccagttatcccagcaccatttattgaatagggaatcttttccccattgcttgtttttgccagctttgtcaaagattagatagttgtaggtatgtggtcttacttctaacctctctattctgttccactggtgtatgtgtctgtttttgtactagtaccatgctgttttggttattatagtgctgtagtatagtttgaagtcgggtaatgtgatgcctcaagctttgttctttttgcttaggattgccttggctacttaggttcttacttggttctatatgaatttttaaatagcttttttctacttctgtgaagcatgtcactggtagtttaataggaatagctttggacagtacaaccttttaaatgatattaattctttctctccattaacatggaatgatttttcatttatttgtgtcttctctgacttctttgagcagtgttttgtaattttcattgtagagatttttcacctctctggttagctgtattcatatgtactttattctttttgtggaaattgtgaataaaattgcctctctgatttggctcttagtttggctcttcttggtgaataggaatgctagcaaattttgtacattgattttgtgtcctgaaactttgtggaagttgtttatcagttaaggagttttgggtcacaactatagggtttagatagagaattatgttgtctgcaaacagaggtagttggacttctctttctatttaaatacgctttatttctttctcttgtctgtttgctccagaaaagacatctaaaattatgttgaataggagtggtgagagagggcatccttgtcttgtgtgggtttcaaggaggatgcttccagattttgcccatttagtataatgttggctgtgagtttgtcataggtggcctttattattttgaggtatgttcctttgatacctcatttaattgagaatttttaacatgaagctttgttgaattttactgaaagccttttctgcatctgttgagacaatcacgtggttcttatctttagttttatttatgttatgaatcacattttattgatttgcccatgatggaccaaccttccattccagggaagaagcttacttcactatggtgaattaaccttttgatgtgttgctagattcagtttgcaagtattttgttgtggattattgaatggatgttcatcaaggatactggccttaagttttctttttttgttgtgtcactgccaggctttggtatcaggatgtttctggcctcgtaggacaagttggggaagagtccctcctcctctatttcttgaaatagtttcagtaggactggtactggctcttctttgtacatgtgttaaaatttgttaatctatcaggtcctgggcttttttggggagtggataggctatttgttaaggattcaattttgggagctcataattggtctgctcagagactgaatttcttcctggttcagtcttgagagagtatatgtgtccaggaatttattaatctcttctagggtttctagtttgtgtgtgtagaggtgctcatagtagttgctggttgttatttttatttctctggggtcagtggtaacattcccttcatcacttctaattttgtttatttgaatcttctctcttttcttctttattagtctatctagtgccctatcttattaattttttcaaaaaaccttgattaagtgatcttttgaacttttcatgtctcaatttctttctattcagctctgattttagttatttcttgacgtctataagctttgtagttgagttcttcttgcttctttaattctttcagttgtgatattaggttgttaatttgagatatttctaatttttcgatatgggcgttacttcttatgccctactctaacttttgtccttctagaaaactcagaactatgctttctaaaccaattcaaactttctcagtgaatcaacctggtctccctgaggcaaagttcacaattttccattacacatggttctctttctctgtaagaatatctagtgcaacaatgcaagtgtttctttccctcctggtaatgcgggaaacaccttttggctgagaccgagacttaaaaccttgttcttccaacactaatgaagatctatttagaaagcctccatttttacagaaaagatatataaacaccaatgaaaataaatatgaaattatatgacatgtaattatattgtggaacgactgaataaataagtgaactaagctctaagaaaaaagatgatgatataaaattatatagaagtaaaaaccttggctggtatagcataattaatgtatcagtaaagcatgtacactgtagaagggtcaggaagacagcacacagagtgagaccggaccaaaagctttaacggaagttctatacccttaaacaagattaaagtggactcaggaaaacatgggccacatgaggggaaggacacatgttccagacaggccaaagctcagaggatctctaccttctccaggaggaaaggggaggcaaagcagcaggcagaagacatcacggccaggtcagcacagggcactcaggccaagccaggtgggctccatcctacagttagtgaggagccactgccgggtgggctttattcattagtttgttttgtttcctttagtaacgaaggcacatgatcaaagttgacctttgtaagtgctgcagctgaacaaaaagatagatataaccagtattttaaaaattatgttgtataaagcactaccctcagtgagatattagtagaacacacatgcacacacacgcacacacactcacactgagcccagattattctggcaaatgctgggttaagcaaattgaaagaaacatcttttgtgctggacttctcagaacctggaatgtggctatatgactcataaaacagcaaggttaagacagagcatgtcattttttcccagaaatgttgaaacactttccttcccttggcttcagtgtcaccttctttctcctggttctccttcaatctctttggctgctccttcttgatttcctttttgacaatctgctgctgctcagccattctcttttctttcaccatggatttctcaagtgtgtttctattcctgcagattaaacttcccttgtttttcctgacaactctccttgtctgaccctccctggttctaaggcaggtgttccatctgtgtgggcttttggcatcctgggatgctcccagcatgttccctgccacacttcatcaggttttctccgtagactctgcgagggcagcaaccttgtctccactgttccttcaatgctcagcacataacacggaaactgactccataacatttagttggccaactgagactaaatgtatgttcctctaggtcttaaaaagttacagaaacatagcacaatagacaaaaaaaattctctttagtcaggagttctctatatatgtacaacagtttgaagtcattattaaagcaaagtgaaagagaaactgtcacaaaattccctaagataaattattttgctttaatcttcaattcattatgtgagataatcaagaccatgtgttattgtacatatttctagcttacaacacaatgacctgatttttattgtttgaaataacagcaatataaatcagttaattaaaaattgcataaataatcctttcaaataaaattctgcctaaattttccattactcatatgttcaaatgataatgagctcataggcttttccaatacctcagtcaaaacattctactgattccagctgtgggaatactacctgaaagttattttacagatggggaaaatgtacttacgtgacgttggcctttgcactactgtgcccttttgggtcaggaaaaagctgttcccttaaagtcctaaaatctcttctgtcaggtctgaagggtgggtgggaaacacagttttatgaattttagccacagatgttttattccttgcttaaagcagtgactagataaaggccactagaagagcctcctatgttactttagaagtgtgtgcctgagaacgtcttcctgaaacactcccttgtctctgcccaaaatcaccttaggtaggaaaatcaaaactcagcaggctgaggagatcgaaggggatcactgagctctgagtcttatgagagaagagagaggggtctaagactttttgtgtataaatttaagggttccaagtgcaattttgctgtaagcatggatggcatagtggtgaagtcagggcttttaggtatccatcaccagaataacgcacattgtacccattaagtaatttctcactgttcaccccttccatcccctcacgctgctgagtctgccttatcattacactctctacgtcaatatctacacatcttttagcacccgcttatgagtgataaaatacgatgtttactctgtgtctggcttgcttcacttacaacaatggcctccagttccatccatgtgtttgcaaaagttatgattctattgttttttttgcctgaatagtatttcattgcgtatattttctacattttctttctccagtcatttgttgatggacattaggttgattttatatctgtgttactgtgaatagtgttgcaacaaatacacaagtacagttatctttctgatacattgatttcttttcctttgcataaatactcagtggtgggattgctgaatcagacagagccaatagatgatcagtaatggtggccaatcatcagctagaaacaaagtacttagcagagcttgaaaacaccaaaactctgagaccactgaccttccaaaacttcaacagttcaacagccctgagtgaaaagtccaaacacatttatctaccattcgaagacgctttattgtctgtcctctgtgcatctcagtagtctctttttaccacactgtctatatactgcataagccatttatatgaaactatctgacactccaaggcatcttatactatatagtcaaccatgtatccctagtacctagcacggtcctggcatatagtttgctactaaactcttgcagaatgaaggaattatcttgtatccaggttccaagttttaaggtgattcttcactaaaaaaatgtattacagttcacaaataatctacttccctttttacaaatgggatcgattttaatcttatcccctaataacattactttcatttactccgatctaaatatactgtcctaagagagcaattagaaagagagttgaagctggagtttgaagaattgtacatggtcctgtgatcccctaccttgttttaacctgagtgactctctcctagcagagagagagccggagagactccattttagcttcttcaagtgcagcccccattacctccctcccttaagggcataactagtgtaaactgactcaaagcacgtccaggaatgcacttactgataagatattgaggcaagctgcaccagcagctcctggggacgcgctcggtgaatgtcaggcaaaacccctgcatttttctttttgtgatagtttaagcccctgcacctggaactgtttatttgttttgtaactgcttttgtaaccaattaattttttaactatttgccagctctgcttctgtaaaaattgtttcagttaaactttcccctcccctatttagaccacagaataaaaacaaaaccagccccttcctcagggccaagagaattttgagcgttagctgccctcggtcgccagctaataaaagactccttaatttgtctcaaagtgtggcgttcctctataactcgcttggttacaacagtccagactgtggcctgaggtgcatcgcccacctgagcttcatctgttaggtatgtcagggaagataagcagggtgagagtggcctcatcggaggaccccagatctctggcttccccatttggcaagtgcacatctgtgaacaaagacttcagagccagatgacaagaacggcccaagcagtccactagggaaacctgggcccagtgtacatcaatgcagagcatcaagcatggcgtaacagttgcacagttgcctattcctgttcagagatgactgcatctcacacactgtaaaatgaggaaatgcagagaagcagatgtaactgaagaagacagcaggagcaacaaggagggacaaccacgacctaggaaggcactatgccagagacgcctggaccccacgctaggcttagtgccctttatactcttgggacgcagcgctttccctctccatcacaatgcatacttgacattatttgttgtttaaaatattgtccttagatttcacctttcctaggagacacaggcagaccctgtgacactacagcttctggcacacagcaggtgcatcacaaacatctgctgagttcacacactcttgccttctcaaaccttcttgtcaagtcttcagtgaaaaggaattgctgattgagcaagaattaaacttctagagactccgggacccactgaagtttgagacaaggtgagatttgtttactgccatattcctagctcatagcatactgtagtcacttaaaaaatgtttgttgaatcagtgagtgaattgattcatacgtcatacttagctatatattttctgagaaaaattgataaatttaatagtttaattctagtataattttactttacttactcaacgaacctgacaattcaactcggtgccaagcaccctgctgctgaagaaaaagaggtataagatacgacttctgtctacaagaaagccacagtctaaaaagtagaaacatatgaataaattataacaataaataggctaaattcaaaatcagaggggtttgtttctattttaatcagctctagtcaggaagtgttagaaagttctaaacaggaaatgttccaacacaccatccaagcatgaagcaggagacacccataattgagtttgctgccgccaaccccaacagcaagaattccagtcccgctgctgcaaagtaagtgtcactctgattttattactgctgtgtaacccagtttcagactctctggttctctcttaatattctaaaaaactgttaaagagaaaataatattatggtgatgagcccatccactgcagccatctcaacatcataccaattataagccctatcatttaaatagaaaactgttagtttaacttatttatccaaatatcagtattagataaacatgtttgtcatcagactttggatttgtgggttaaatagcatataaatatgattagagccttaaagtttacacttctctggtttgctcaaatttttttcaaaatagcgtatgcctttctaaaaaattgttagtatattttttaaaatgaacattaatatatatattttccaaaaacaaaatgcagctcccattggtaaatgatgatgttgagatacaacagacaacttatcttggaaaccatttaatcagtgctcacttttgcactctttccagaaatgtcaatggctttaaaatgtagaagtatattatacaactaaacttacacttattcagtattgtgcaatatttagtacttgttctagctatctcttgctgaatagtaagccattccaaaacttaaggaattatttattgtttaatattgtttattgttattatttgttcagtgattttaaataatgttatttctcatggttttgtgggttgatgggcactacaaaagttctcttttggagtctttcttgcagttgctgttggttggctgctgctgaactcacctgaaggctccactagactaaagagcctagacgggtcactcatatggctggcagtgcatattggctgctgagtgtgatgcctatctgacctctccatgctatctggagtgctcacaacttggtagttggtcccaagacacacaggcaaatactacaaagcttcttaagacctagccttggaggtcctagaatacaacttctgctccatcctattggtaaagcaagtcattgtgaccagcacagattcaagaaattggagattcgactccagctgtcaatgtaaagagcagcatgtgcatgcagggaggaaagaaattgagggcatcatcttgaaaactatcatatcacattattattccaactaatgaacattatgttttagatgggtagtactagctactcatctctcccccagaaacccaagctaagcatggaaatattgaagagaatgtcagcaccattaaaaaaactctagaaaaatcacatgtgatgactgaggttaattcagtctgtcaattacatcaatataattcccttcctgtaaccctaaataaggtgaagcagaattgaattctacaaaagcttttcatctgttttcctatagaataattaacaaacctaataaatgtataaatagtatgaagtccaatttattttagacttttaccttttaatttcaaagcttaaagaaatccagagaactaatcatcatagtccgtaatgcctggaccagaagtccttgttctaagagtatcttgtggcatgctaaaaatgtattactaactaggaaatttaaaacttttttgttagtgattttaagagagctgactagctcatcaccacaattcacacagattaagaatggagattactctgctgagtggattcacagtgatcagaaaaaaaaatcgcaaaagagggaaggagatagagaaggggaaacatactgtcaatccctacaattaaagtgattttttgaatggtttgattttgtatttgcaaaggaaaggcagcttattgtgatggaataagaatcccacttctgtatatatatatacatatatatatatatatatatatatatatacacatatatatatatataaaatatatatatattttgagacggagtctcgctctgtcgcgcaggctggagtgcagtggtgcgatcttggctcactgcaagctctgcctcctgggttcacgccattctcctgcctcagcctcccgagtagctgggactacaggcacccgccatcacgcccggctaattttttgtattttttgtagagacagggtttcaccgtgttagccaggatggtctcgatctcctgaccttgtgatcctcccaccccagcctcccaaagtgctgggattacaggcgtgagccgctgtgcccggcttgtcttcttttgagaagtgtctgcttatgtcccttgtcaatgttttaatggggttgttttcttaatgttcaacatcactaatcatcagagaaatgcaaatcaatgtgagataccatctcatattagtcagaatggctactattaaaaagtaaaaaaaaaataacaaattctggttagacttcagagaaaatgaaatgcttatacactgttggtgagaatgtaaatagttcagccactgtgaaaagcagtttggagatttttcaaagaatttaaaacagatgtactattcaaccagcaattccattgctgagtatatatccaaaagaaaattaaaaattctacaaaaagaaaccccacatgcacttgtatatgcgtcatattgctattcacaatagggaaggcatggaattaacttatgtgtgaaccaataaattggatagaaatatgtgccacatatacaccataaaatactacgcacacattaaaaagaatacaatcatgtcctgtgcagcaacatgcatacgtctggaggccattatcctagggaaattaatacaggaacagaaaaccaaataccacatgttcttgcctataagaaggatctaaacatggggtactcatgaatataaagatgacagcaatagacactgagaactactagatgaaggagggaaggaggagggcagggggtgataaactatgagtgctatgcttactgcctaggtgatgggatctattatatcccacattgttcagcatcacacaatatatccatgtaataaacctgcaaatatactccctgaatctaaaaataattaaggcagagacagaataagagggcagaatagaagcctacattctcatccaccacacaaaaacaccaaattttcacaactcactacattcaagaagcactgtcaaagggaccaaaaattgggtgagtaatcacagtacctggtattaacttcatatcactgaaacagacattgaagaagacaaacaaataaaagattgtctagaggcacggatgccacctctttttcaaccaccagtagtggctacatcgtgcagagatagtatgtttgggagagggagagcagagtttgtgaggctttgcaataaactcagtactgccctgtcacagtgaaaagcagaaccagactgtactcagctgacatctgccaatggggggaacacttgtattggccttagaaagaggaaaacctcccatcttagtgttgggagcttgagttttcacaagtcttgccgtcatgagttgacatgctattggactctaaaagaacttaagggcagtctgggccacaaggacttcaattattaggcaattcatattctgagctggactcagagacagtggaatgtggagggtggggagaatggggtctactgagacagcagccagaaaagctaagggagtgctcacaataccactcccccactcccacctagcagcagccacaaaacacagaaaaacctgtgaatttgggagagggagagcacagtgactggaggacttttcattaaactcagtgctgccatgtcagtaaagacctggcagaattcatcacctgctgactaaagaacccctgtacccagaataaaaaacagtgacaaccaggtaatacaacatgggcattggactctgagaagcgctaacttcaggtgtgacccagtacatttctagctgtggtagctatggtgaaagatttctgtttcagaaaagcaggggggaaagtaaaggatccactgcattgcacctgatatgccagctcaaccacagtggggtagagcaccaagtggattcttagagtccctaagtccaggcctagagtcttcttggtcagcatttctgcacttgccctgggccaaaggtcgagtcccaggcattgcagaatttatcacaagctaattaaagagtccttgggctttaagtgagaaagtgatgatgatttggtggaaaccccccatgggccagtagtgttggcagtcatagaagaggctcttctgcctgcagacaggggaaggaagagtagaaaatactttgtcttattccctaagtgccaggttagctacaataaaatagaagagcaggtaaattttgaagatcctatgctttaatctctggctcccaggtaacatctgtggacccactcatggctaggggaacttgccaccctataggcagagacacaaacctggctgtctttgccacctattaatcacagagtcctagggctttgaataaacttatatggtagccaagtagtgcttgcagtgggccttgagtgagaccaagttctgtgcctacttcaggtgtgaaccagcacagtctcagtggtggtggccacaggagtgcttatgttaccccaaccccagcttcacatgtctcagcacacaaagagtgactgctgatttgagagaaagtaaggtaagagaacaagagtctctacttgataaatcaacagaatttttcttgatgttaatccaaggccaccaaggcagtacctctatgtgtttgcataaacaactttgctattgggtctggggcccaagtttctttgaatacctggaaagtgttcccaaagataatgggcactaacaagcccagactgtgaagacttcaataaagactgaactcttcaatgcccagatacagatgaacatctacaagtatcaaggccatccaggaaaacattacctcaccaaacaagctaaataaagcaccagggacaaatcccggaaaaacagagatgtgtgacctttcatacaggaaatccaaaatagctggttgaggtaattcagagaaatgtacaatgtaagacagagaaggaattcaaaattctatcagataaatttaacaatgagattgaaataaaaagaataaagcagaaattatgaagttaaaatgccattgtcatactgaagaatggatcagaattacttaaaagaattgaccaaggagaagatagatttagtgaacttgaagtcagactatttaaaaatacaaagtcagatgagataaaaaagaatacaaaataaagcatgcctatagaatttaaaaaatagcctcaaaatagcaaatctaagagttattggtcttaaagaggaggttgaaaaagagatgagttgaacatttatttaaataaataatattaaataatattaaacaattcctcaacatttgatatcaacattcgagtaacagaaagttacagaacataaagcagatttaacccaaagaagaccacctcaaggcacttaactgaactcccaaaagttaaggataaagaaatgattctaaaagcatcgagagaagagaaacagataactttcagtggaactccaatacatctgacagcagacttttcaggggaaaattgacaggctgggagactggcatgacatatttaaaaagctgaaggaaaaaaagacttttactttagaataatgtatctggcaaaaacgtcctttaaacttgatggaaaaataagaactttttccgacaaacaaaaactgagggatttcattaacaccagacctgtcctacaagaaatgctacagggataacctaacctaaaagaagaaaagtaagtgagcaataagaaatcatctgacggtacagaactcactagcaatagcacatggaaaaacactgactattataatatggtaattatggggtgcaaaaatctcaaatagaaagagtaaacatatgaactttaaagtagttttttccaattctgtgaagaaagacattggtagcttgatggggatggcattgaatctgtaaattaccttgggcagtatggccattttcacgatattgattcttcctactcatgagcttggaatgttcttccatttgtttgtaacctcttttatttcattgaacagtggtttgcagctctccctgaagaggtccttcacatcccttgtaagttggattcctaggtattttattctctctgaagcaattgtgaatgcgaattcactcatgatttggctctctgtttgtctgttatttgtgtataagaatgcttgtgatttctgtacattgattttgtatcctgagactttgctgaagttgcttatcagcttgagattttgggctgagatgatggggttttctggatatacaatcatgtcatctgcaaacaggaacaatttgacttcctcctttcctaattgaataccctttatttccttctcctgcctgatttccctggccagaacttccaacactatgttgaataggagtggtgagagagggaatccctgtcatctgtcagttttcaaagagaatgcttccaatttttgcccattcagtatgacattggctgtgggtttgtcatagatagctcttattattttgagatacgtcccatcaatacctaatttattgagagtttttagcatgaaagttgttgaattttggcaaaggccttttctgcgtctgttgagataatcatatggtttttgtctttggttctgtttatatgctggattacatttatcgatttgcgtatatttaaccagccttgcatcccagggatgaagcccacttgatcatggtggataagctttttgatgtgctgctggattcggtttgccagtatgttattgaggatttttgcatcaatgttcatcaaggatattggtctaaaattctcttttttggttgtctctctgcccggctttggtatcaggatgatgctggcctcataaaatgagttagggaggattccctctttttctattgatcggaatagtttcagaagaaatggtactagctcctccttgtacctctggtagaattcggctgtgaatccatctggtcctaggcttttttgattggtaagctattgattattgcctcaatttcagagcctgttattgttctattcagagattcaacttcttcctggtttagtcttgggagggtgcatgtgtcgaggaatttatccatttcttctagattttctagtttatttgcatagaggtgtttaaaatattcactgatggtaatttgtatttctgtgggatcggtggtgatatcacctttatcattatttattgcatctatttgattcttctcccttttcttctttattagtcttgctagtggtctatcaattttgttgatcttttcaaaaaaccaactcctggattcattgattttttgaagggttttttgtgtctctatttccttcagttctgctctgattttagttatttcttgccttctgctagcttttgaatgtgtttgctcttgcttttctagttcttttaattgtgatattagggtgcccatatttgatctttcctgctttctcttgtgggcatttagtgctataaatttccctgtacacacgactttgaatgcgtcccagagattctggtatgttgtgtctttgttctcgttggtttcaaagaacatctttatttctgccttcatttcgttatgtacccagtagtcattcaggagcaggttgttcagtttccatgtagttgagcggttttgagtgagtttcttaatcctgagttctagtttgattgcactgtggtctgagagacagtttgttacgatttctgttcttttacatttgctgaggagtgctttacttccaagtatgtggtcaattttggaataggtgtggtgtggtgctgaaaagaatgtgtattctgttgatttggggtggagagttgtgcagatgcctattaggtctgcttggtgtagagctgagttcaattcctggatatccttgttaactttctgtctcattgatctgtctaatattgacagtggagtgttaaagtctcccattattattgtgtgggagtctaagtctctttgtaggtctctaaggacttgctttatgaatctggatgctcctgtattgggtgcatatatatttaggataattagctcttcttgttgaattgatccctttatcattatgtcatggccttcgttgtctcttttgatctttgctggtttaaaatctgttttatcagagactaggattgcaacccctgccttttttttgctttccatttgcttggtagatcttcctccatccctttattttgagactgtgtgtgtctctgcatatgagataggtttcctgaatacagcacatggattggtcttgagtgtttatccaatttgccagtctgtgtcttttaattggagcatttagcccatttacatttgaggttaatattgttatgtgtgaatttgatcctgtcatgatgatgttagctggttattttgctcgttagttggtgcagtttcttcctaacattgacggtctttacaatttggcatttttgcagtgactggtaccggttgttcctttccatgtttagcacttccttcaggagctcttttagggcagacctgacggtgacaaaatctctcagcatttgcttgtctgtaaagtattttatttttccttcacttatgaagcttagtttggctggatatgaaattctgggttgaaaattcttttatttaagaatgatgaatattggcccccactctcttctggcttgtaaagtttctgctgatagatcagctgttagtgtgatgggcttccctttgtgggtaacctgacctttctctctggctgcccttaacatttttttcctcatttcaactttggtgaatctgacaattatgtttcttggagttgctcttctcaaggagtatctttgtggcattctctgtatttcctgaatctgaatgttggcctgccttgctagattggggaagttctcctggataatatcctgcagagtgttttccaacttggttccattctccctgtcactttcaggtacaccaatcagatgtagatttggtcttttcacatagtcccatagttcttggaggcattgttcatttctttttattcttttttctctaaacttctcttctcacttcatttcattcatttcatcttccatcactgataccctttcttctggttgattgaatcagctactgaggcttgggcattcatcacgtatttctcatgccatggttttcagctccatcaggtcctttaagggcttctttgctttgtttattctacttagccattcatctaattttttttcaaggtttttaacttctttgctatgggttcaaactttctcctttagcttggagtagtttgatcgtctgaagccttcttttctcaactcgtcaaagtcattctccatccagctttgttccgttgctggtgaggagctgcattcctttggaggaggagaggcactttgatttttagagtttccagtttttctgttgttttttccccgtctttgtggttttatctacctttggtctttgatgatggtgatgtaaagatggggttttggcgtggatgtcctttctgtttgttagttttccttctaacagacaggaccctcagctgcaggtctgttagagtctgctggaggtccactgctgaccctgtttgcctgcgtatcagcagcagtggctgcagaacagcagatattgctgatccggaagtgctgctgcttgatcgttcctctggaagttttgtctcacaggagtacctggccatgttaggtggcagtccgcccctactgggggtgcctcccagttaggctactcagggttcagggacccagttgaggaggcaatctgcccattctcagatctccagctgcatgctgggagaatcactactctcttcaaatctgtcagacagggacatttaagtctgcagagatttctgctgccttttgtttggctatgccctgcccccagaggtggagtctacacagccaggcaggcctccttgagctgaagtgggcttcacccagctcgagcttccaggctgctttacctactcaagcctcagcaatggcagggtacccacccccagcctcgctgccaccttgcagtttgatctcagacttctgtgctagcaatgagtgaggctctttgtgcgtaggaccctccaagccatgtgtgagatataatctcctggtgtgccgtttgctaagaccattggaaaagtgcagtattagggtgagagtgacccaattttccaggtgccatctgtcacccctttctttgactaggaaagggaattctctgaccccttgtgcttcccgggtgaggtgatgtctaaccttgcttctgctcatgctcagtgcactgtacccactgtgctgcaccctctgtctgacactccacagtgagatgaacctggtacctcatttgcaaatgcagaaatcacccatcttctgtgtcgctcattctgggagctgtagactggagctcttgctattcggccatcttggctccaaactctgttttgcttgtttctttgtttatgcaatcagtgttaaattgtccacagtctaaaatcatgtattatattattttcaagccttatggtaatttcaagtcaaaaagtgtaccacagatgtacaaaaagtaaaaagcaagaaattagattataattcaggagaaatcaccttcactaaaaggaagacaggaagaaaggaaagaaggaagagaggacaaaaatcaatcagaaaacaaataaaaaattgcaggagtaagtgcttatcactgataacattgaatttaaatgaactgtatactccagtcaaaagaaaaatagtggatgaatggatagagaagcagaacaataatctgtgacctaccaaaaaaacacactttacctataaagatacatttagactgaaaataaaaggatggaaaaattattccatgccaatagagaccaacaaaagcagaaatagccatacttataccagacaaaaatagatttcaacaaaagactgtaggaagaaattaaaaggtcattatataataataaagagatcaattcatcaagaggatataataattgaaaatatatatgcacccaacactaaagcatctagataaatgaagcaagtattacaagagctaaagaaaaagatctcaatacaataatggctggacacttcaacaccccactttagtcattggatagaccttccagacagaaaataaacaaagaaacgtcagacttaatctgtactatagaacaaatgaacctaatagatatttacagaaaatttcttccaacagctgcagaatacacatttttctccccagcacatgggttattttaaaggatagaccatatgttaagtaacaagtctaaaaacattccaaaaaattgaagaaatatcaagcattttctctgactacaggggataaaactagaaatcaattaaaaaaggaatttaagaaactatacaaacacatggacattaaacaatatgctcctgaatgattagtaggtcaataaaaaagttaagaagaaaatagaaaaatttcttgaaacaaatgataatggaaacataacatagaaaatcctatgcagtatagtaaaagaggtactgttataaaaggaaaatttataactgtaagtgcctacataaaaaacagaaagacttcaaataaataacctaaaaatacatcttaattaattagaataaaaagaccaaacctaacccaaaattagaagaaaagaaatagtaaagattagagcagaagtagataaagttaaaatgacaaaaataatgtaaagaattaatgaaagaaaaagttgattttttgaaaagtgaaacaattgacaaatatttaaacaggctaactaaaaaacagaaaagatacaaattagtaaaatcagaggtgaaaaaggagacattaaaagtaacacttcagaaaagcaaaggatcattagtgaatactatcagcaattgtatgccaacaaattagaaaacctagaggaaattaattcttagacacacacaacttaccaagattgaactaggaaaaaatctaaaacctgaacagaccaataacgattaacaaaattaaaaccttaataaaaaagtctgtaggaccagactgaaaactagagaaggaaagaacatttccgaactcattctttgaggctagtattacccttgatatcaaaaccagacaaagacatattaaaaaaagcaaactacaggcccatatctgagaatattggtgcaaaaatttgcaaaacacctagaaaactgaattcaacaatacataaataggtaattcataatgaccaagtgggatttatcccagggatgcaaggatggttcaatgtgcaaatcaatcgatgtgatagatcacataaagagaatgaaggggccaggcacagtggatcacacctgtaaccccagcaatttgggaagccgaggtgggtggatcacctggggtcaggagtttgaaaccagtctggccagcatggcaaagccccatctgtactaaaaatacaaaaattagccaggcatggtggtgagcacctgtaaacccagctactcgggaggctgaagaaggagaatcacttgaatcagggaggcagagtttgcattgagctgagatcatgccattgcactccagcctgggtgacagagggagacttcatctcaaaaaaaaaaaacaaaaaacaaaacaaaacaaaacaaaaaacacagacaaaatccatataatcatttcaattatgctaaaaaagttttgataaaatttaatattctttaataataaaaaccctttgaaaactgggtatggaatgaacatacctcaacataataaaagtcatacatgacagacccacagctagtatcacactaagtggggaaaaactaaaagcctttcctctaaaatctggaagatgacaagaatgtccacttttaccactgttattcaacataatgctgaaagtcctatctggagcaatcagacaggagaaagcaataaaatgcatcccaattggaaaagaagtcaaattaccttttttttttttttttttgccaatgttataatgttatattggaaaaagtataaagactcctctgataaggtttgaatgtgtgtcccctcccaaatctcatatttaaatataattctcattgttggagatgggcctggtgaaaggtgatttaaccattggggtggattactcataaatggcttagcaccatcccatttggtgctatcctcatgatagtgagtgagttcccataagatctggttatttaaaactgtgtaacaactcgtccctctgtttcttgctcctgctttttgccctgtgatgtgcaagattctgcttcaacttctgccatgactgtaaacttccagagacctccccagaagcatattccagtactatgtcttctctaaagcctgtagacaattttctgtaagacagaaaaatgagggaaagttgagattttcttagagattggttgaatgtctgtgaccaaaatgctgatagtgatctggacagtgaaggctgggctaaggaggtctcagatgaaaactagaaacttattgggactgaaacaaaggtcatgcacgttgtcttagcaaagtggttggctgaatttctgtcatgctctagggatatataaaagtttgaaattgatgatttaaggtttctgttggaaaaatatctaagcagcaaagcatttgtgatatggactggctgcttctaacaacctatgctcacatgttctagcaaaaaaataaaaataaaataagtagtaacttatacttacacaagaagcatagtgtaaaagcttgaaaactttgcagcctagtcatgtggctgaaatataaaaagctttcatgagaggaactcaagctggatatgggtcaaccacttgttagagatatttgtataacctaaaaaaaagcaagtgttgatagccaagacaatgggaaagaggaattgaaggcattttagaaatctaaaaggcagcccccccatcacaggccctgaggcctaaaagaagagaatagtttctgggatcaggtccaggaactgctgccttgggtagctttggaacaaggctcctgcatcctggccactgcttcagctccaggtgtaggtcaaattgacccagttacaactccagtcactgcttcagagggtgcaagccataaccttggtagcttccatgtggtgttaggcctgtgggtttcccaaatgtaagtagttgagacttgggagcctccacctttatttcacaggatgtatgaaaaagccaggatgtgcaggcagaagcatgctgcaggggtggagccctcatggagatcctctactaaaacaatggagaaaagaaatgtagggtgacagtccccaggccgtctccccactgggtcatggcctagtagatctgtgaggagaggatcactgtcctccagaccccagaatggtagatctagctacagcctgcaccttgcaccttgaaaagccagaggcacagaatgccagcccatgagagcagctgtgggggctgaaccatgcaaagtcacaaggtagaatcttcccaaggcattggcgtgccctggaaatggaacacagggtgaaaaataattattttagagccttacaattgaataactgcccttctgggtttcagaatttcatgggtcctgtggcccctttcttttggctgatttcttccttttagaataggagtatttacccaatgcctctgcctcatttgtatcttggaagaatctaacttgttttttattttacaggcttataggaggaagaaattagctttgtcttagatgagacttttgacttttgagttaagactgaaactagttaagattttggggattattgggaagtcatgattgtattctgaaatatgagaaggatatgagatttggaatggccaggggcaaaatgatacagtttggatgtgtattcccaccaaaatcttatattgaaatataatcctcaatgttggaagtgggcctagaggggaggtgattgaatcatgagggcaagatttccatgaacagtttggcatcatttcctttggtgccattcccacaatagtaagtttttatcagagctggttatctacaagtgtgtgtagcacttcccccctgccctcgcacttaccatgtgatgtgcaagcactggatttatttttcaccttgtcaattgtcagaggcttccccagaagcagaagccagtgctatgctttctgtacagcctgtagaaccatgaaccaattaaacctattttctttataaattaaccagtcactgattactttttatagcaatatgagaatggcctaatacatccaccaaaaactattagaggtaataacttgagtcaatttgcagaatacaaaatcaacatatacaaatcagtagggtttctttacgccaacagtcaacaaactgaaaaagaattcaaaaatgtaatactatttgcagtagccacaaataaaacaaaatttgtaggaatttaccaaagaaataaaagttctcaacaattaaaaccgtaaaacactgataaaagaaatgaaaaaggacccaaaagttggaaagatatttttatgttcatagattggaagaatcagtattttttaaaaaacgtccatacaatccataggaatctattcatttcattccatctctatcaaaataacaggccaggggcagtggctcatgcctgtagtctcagcactttgggaggccgaattttgtggatcacgaggtaaggagttcaagaccagcctggccaacttggtgaaaccccaccactactaaaaatacaaaaaaattagccaggcatggtggcaggtgtctgtaatcccagctattcaggaggctgaggcaaaaagttgcttgaacccaggaggtggaggttacagtgtgccgagatcacatcactgcactccagtctaggtgacagagcaagacgccatctaaaaaaaaaaaaagaagaagaagaagaagaagacattcctcacagatatagaaaaaaaattctgaaatttatatggaaacatcacaaagtcaaagctatgctgagtatataaaacaaaactggaggaattccattacctggttttaaattatactaattaaaacaacatgacactagcataaaaacagacataaagacagatagaacgaaatagagaccttagaaagatactcatacagttaaattaattttcaacaaaagtgccaagaacatacaataaaaaataagacagtttttgtaataaatagggctggtaaaactggcattctgtgtgagggacaaacattcagaccctcatagcagtgttctggaatcctatgtgagggacaaaccttcagaccacagcaggagtgttctggaatcccctgtgaggaacaaacattcagaccctcgtagcagtgttctgaaatcctatgtgacaaacgtttagaacccagcaacagtgttctggagtcctatgcaagggacaaacattcagaccctcatagcagtgttctggaatcctatgggagggacagctaaattaattttcaataaaagtgtcaagagcatacaataaaaaatgagacagcttttgtaataaatagggctgggaaaactggcaagccataggcagaagaataaaactagaactctatttcttgccacttacaaaaatcaaattaaaatgaattaaagacttaaacctaacgcctcaaaccatcaaacttttagaaaaaaacattggggaaactctttaggtcattgatttgggcaaaaattccttaaataatgccccagaagcacagacaaccaaaacaaacatggacaaataggattacagaaagtcagaaagcctttttaaagtgaaggaaacaagaaacaaagtgaagagaaaatccacagaatgggagaaaatatttgtaaattatccatctgaaaagcaattaatagctacatgatatggttaggatttgtgtccccacccaaatctcatattgaattgtaatccccagatgttgagggagagacttggtagaaggtgattggatcatgggggtggtttcccccatgctgttcttctgataatgagtgatttctcatgagatctgatggttttataaaggactcttccccctttgcttcacatacatgctctctcgcctgctgtcatgtaagaggtgcctgcttccccatctgccattattgtaagtttcctgaggcctccctggccatgtggaactgtgatttaattaaacccatttcctttataaattacccagtcttgccaggtgtggtggctcatgcctgtaatctcaccattttgggaggctgaggcaggtggatcacgaggccaggagttcaagaccagcctggccatgatggtgaaaccccgtctccactaaaaatataaaaattagccaggcatggtggcaggtgtctgtaatcccagctactcaggaggctgaggcagagaattgcttgagtcaggaggtagaggttgcagtgagccaagattgcaccactgcacttcagcctgggcaacagatcaagacttcatctcagtaaataaatagataacacagtctcaggtaattttttatagcagtgcaggaacagactaatacactacaatatattgagttcaaaaaattctacagaaaaatgtaataacccaaataaagagtggacaaaaaatttaaatagacatttatgaaaagaagacatacaaatgtcaaacagacaaatgaaaaggtgctccacattactgatcatcatagaaatgcaaatcaaacccaaaatgagatatcatttcaccccagttaaggtggcttttatccagaagtcagtgaaaaacaaatgctggtgatcatgtggagtgaagggaacccttgtacactgctgttgggagcacatttaaggatagtttggatgttcccaatataattaaaaatagagctactgtatggtccaggaatcccactgctcagtatatgcctacaagaaataaaattggtaaatcaaagacctattggcactctcatgtttgctacagcagggtttataatagccaagatttggaaggaacctaaatgtccatcaacagatgactggatagagaaaacgtggtacatatacgcaatggaatactattcagctgtaagaaagaatgagagcctgtcatttgcaataacataaatggaaccgaaagtctttatgttaagtgaaatgccaggcacagaaatacaaatgtcacatcgtctcacttatttgtgggtgctaaaattcaaaacaattggtgtcatagagatagagagtataaggatggttaccagaggctgggaagggcaaggagggaacaaggggatagtggggatgctaaatgtgtaaaaaaacaattgttagaaagaatgaataagacagcatttgatagcacaacagggtgattatagtcaaaaataatttaattccacatttaaaaaaactaaaagagtataattggattgtttataacacaagctataaatgcttgaggggacagataccacgttttttattatgtattactcattgcatgactgcatcaaagtatgtcatgtacccccataaatatatacaccaactatgtacccacaaaataaattaaaaattgaaattaaaattaaaattaaaaccaaagggaggagagtataatgaggcatgtgtgacccatggcttgaactagcttttcaggttaactttggaatgtccttatccaagaagagaggtccatttagtcaacaggagtttagaaatttatttttagtttataaatggaaaaaagaaggatttttaatcctgagccatagttctcagtcaatcaatccctgcagggagccctgttctttactctggagataaacactagttttcttttccatggaataacaccacatttcaaaatgaggggaaacatcttgcaactaagaggtacagccttattaaatttgatttagtttccattgtaattaatttaatcacatgtgttctagagtttgtcctcagtcttcccctagtttaggcccataatctgttgaatttgctcagctccctgctcaacagcaggaagtcagaattatttaaaaacctcattgttgctgggagtggtggctcttgcctgtaatcccagcaatttgggaggccaaggtgggcagatcgcttgttgtcaggggttcgagaccagcctggccaacagagtgaaaccccatctctattaaagatacaaatattagctgggtgtggtgattcatgcctgtaatcccagctacttgggaggctgaggcaggagaattgcttgaatccgggaggcgcaagtttcagtgagccaagatagtgcactgcactgcagcctgggcaacagagcaagactctgcctcaaaataataataataataataataataataataataataataataataataaaaaataagtaaaaataaaaatttcattgtgttttaaacaaaatttcttttgaatatcaactatatcaacttgtatattaactataatcattttgtttactttatatccaatcttgagaaatctttgaggactaatttcactctttactgccattttggtaaacataccaaatgccatcaaacaaaatgcacaaaattcctgagaaatacattttctccttgaggagtagacttgctgtgttagaggaactcatggttacctagcttctagtttaataaacatgactagaatattctttttttttgtctttcttttgtatttttattttttattattgcacacaattcacgcagagattaaggagactttttttttttttaagaaaaggggtctcactatgttgctcaggctagaactcctgggctcaagtgatcctcctgcctcagcctcccaaagtgctgggattacaggtggcagccaccacgcccagcccagtctttgcctttcttaatgctgattttttaaagaatccaggtaggccattttatagaatgtcccttgcatttaggcgcatctgatgtttcctcatgattagatctgggttacatgtgtgagacaggaaaaccacagaagggatgccagagactcagtgctttggctgaaggaagcccatgctctcatgcttcctgaagttcacgtgctcagagctcatatgctctgagtgcactccaccaaggctggagtgcagtggcacaaacgagactcactgcagtcttggccttctgagcacaagcgatcctctcacctcagcctcctgaatagctgggattacaggtgcacaccaacatgcccggctaattttttttttaaattattattattttttttattgatcattcttgggtgtttctcgcagagggggatttggcagggtcacaggacaatagtggagggaaggtcagcagataaacaagtgaacaaaggtctctggttctcctaggcagaggaccccgcggccttccgcagtgtttgggtcactgggtacttgagattaaggagtggtgatgactcttaacgagcatgctgccttcaagcatctgtttaacaaagcacaccttgcaccgcccttaatccatttaacactgagtggacacagcacatgtttcagagagcacagggttgggggtaaggtcacagatcaacagtatcccaaggcagaagaatttttcttagtacagaacaaaatgaaaagtctcccatgtctacttctttctacacagacacggcaaccatcagatttctcaatcttttccccacctttcccccctttctattccacaaaaccgccattgtcatcatggccgttctcaatgagctgttgggtacacctctcagacggggtggtggccgggcagaggggctcctcacttcccagtaggggcaactgggcagaggcgcccctcacctcccggatggggtggctggccaggtggggggctgacccccccacctccctcccgggcggggtggctggccgggcggggggctgaccccccacctccctcccggacggggcggctggccgggcggggcgctgacccccccacctccctcccggacggggcggctggcctggcaggggctgacccccacctccctcccggacggggtggctgctgggcggagatgctcctcacttcccagacggggtggctgccgggcagagggtctcctcacttctcagatggggcggctgccaggcggagggtctcctcacttctcagacagggtggctgggcagagacgctcctcacctcccagacggggtcacggctgggcagaggcgctcctcaaatcccagacggggcggcggggcagagacgctccccacatctcagacgatgggcggccgcgcagagacgctcctcacttcctagatgggatggcggccgggaagagacgctcttcactttccagacagggcagccaggcagaggggctcctcacatcccagacgatgggcggccaggcagagatgctcctcacttcccagacagggtggcggccaggcaaaggctgcactctaggcactttgggaggccaaggcaggcagctgggaggtggaggttgtagcgagctgagatcatgccactgcactccagcctgggcaccattgagcactgagtgaaccagactccgtctgcaatcctggcacctcaggaggccgaggctggcggatcactcgcggttaggagctggagaccagcccggccaacacagcgaaaccccgtctccaccaaaaaaatatgaaaaccagtcaggcgtggcggcgcgtgcctgcaatcacaggcagtcagcaggctgaggcaggagaatcaggcagggagttgcagtgagccgagaaggcagcagtacagtccagcttccgctcggcatcagagggagaccgtggaaagagagggagagggagaccgtggggagagagggagagggagagggagaggagggagagggagagggagagggagagggagagggagagggagagggagagggagagggagagcgaatattctatcttaatatgagtagataggtactcacaaggcatctagaaggttaatgttcatggtctgaaaatagtcacattttttaactggccacaaattacaattgcagaatatgtgtgatcatacaagacatcttccaccaagcctgaaaaatgtataaatgtcctaggaatgcagcatttttttgtaaggatattattaatgagctagcttaggtcaatgggttaatggttattgttaaaatcaatagccccgactttagtgactacatctgcaccttccaagtttaattataactctttctctttatagttacttataagtagagatactaacaaaagacaatgcattcctgctcttgttttctgaggatgtccaactctgtaatggaataatttctaataaacttgcttctttcactgtgctctctgactcacctcaaattttttcctgcacaagatctaagaatcctaatttgtggtctgtatcaggaccctcttttccagcaacatctttcagcaacaccgtgaacggacaccaagacaagacccccactccaaggaaaacaatctacacagaatcagtcagctgacacctggcaagtgtgctgtcttttagaatcgtgaagccattctggtgggcaagaatgattatccactattatcatactcagattagaggccaagcccacagggttagaggccctggggtatattgagaagaatggatttggctaaataagatgtttgccactttctctttttggactgtccaccttgtgctctctgtcccttacctgagtgctctacatcttgtcaccattctgctcaccgcctctgttttgtaatagcctggaggctgccccaggacagaggccccaaacagtttagttttactttcttcagcgatcctctgactcttaactgactgcttgtttaatttgccactggtccaagtgacactgaaaaaaagaattgtctcgggacctagtatttttgtaccttaattatcagaaaagatcagcagtaacctcgccatcattatgactagaagttgaaatgtggtatttaagagctctacatgataagatcagatatgcctgtttagtgacagcctcttttatgacaaccctctgcaaacaattaccctcaagatggagaacatgagactttttcttaacagttttctctcatttcttaaccataacgccatctttgatcagctggtatagggcagctggaccctactttctaaacccagcatgtcacttttttcctgagagagttttgtcatttttgtcatagcagtgtgaaaatggactaatacattacaatatacaagttacagccttcccatttcccctgtttgatctgactcctattttgcagcttaatttgttttatagaagagaaactaagagagaggaaatacattatatacaggcttctctgatgcttggtcaggataaaaaattaaaatggacttctatatgtttgatgcaggaaaagataaaatagggacggcatgtaattgattacccttttaatacaagtgcctcttaatattaggcttttcttagctggggctgaactcccccttccagtccaagcaccccataagaacacagttagactccttccagttctagtgaggtgtgcaacatgttattaatttcttctagttttccagggttatctagtgtccggtcatcatcttctccctgcccttcgagtcctgtcttacgtacataccccactctcgaaacaccctagcttcaccagaacaacatgcagtggggcctcttatcagctggcaaagttgaatgtttgccctctctgggaagtgacagatgataatagggacagtatattgaagaagtggcctgtccctccacacctgtgggcgtttctcgtcaggtggaacgagatacttgtgaaaagagacgcagagacaaagtatagagaaaaagtgggcccaggggaccagcgctcagcatacggaggacccacgccggcaccagtctctgactttccttagtatttattgatcattatcgggcatttctctgagagggggatgtggtaggacaatagggtaatagtggagagagggtcagcaagaaaacatgtgaacaaatgtctctgcatcataaacaaggtaaagaaaaaagtgctgtgcttttgatgtgcatatacataaacatctcagtgccttaaagagcagtattgcctccagcatgtctcacctccagccgtaaggcagttttctcctatctcagtagatggaatatacaatcgggttttacactgagacagtccattgcccagggacgagcaagagacagatggctttgtcttatctcaactgcaaaaaggccttcctcttttattaatcctcctcagcacagaccctttacaggtgtcgggctggcggatggtcgtgtccttcccttcccatgaggccatatttcagactatcacatggggagaaaccttggacaatacctggctttcctaggcagtggtccctgtggccttccgcagtgttttgtgtccctgggtacttgagaatagggtttaacaagcatgctgccttaaagcatttgtttaacaaagcacatcctgcatatccctaaatccattaaaccttgggtcgacacagcacatgtttctgtgagcacagggttggggctagggttacagattaacagcctctcaaggcagaagaatttttcttagtacagaacaaaatggagtgtcttatgtcgacttctttctacatagacacagtaacagtctgatctctctttcttttccccacactatataggtacgtgtacacttttctatatctgaattagccatatgcaaggaaaaactaaaacagttttcagaggttccgggaaaattcatagacaaatttaaaaggctaaccttgatgtatgatctgaccaggtaggatttgcatatatttatgtttacctgctgcatggtagaaaagcagtgcatgatgggagtggctacagcacatgctaatagggtggcatcctgcaaccaggggcatgacacctctcaagtaggaggcacagcagtgcctgactaggacccaaaagaggattagaatctagaaaagacaaataagttaggaagaaagtaggatatagagagaaaaaattttgatcatttgactccgtgtaggaataaaaaaaaagtgtgatacagctttttaatttttataaagtctggaaaattactcagggaatagatgaaaatctagccttattacaagggtggataatttagatcttgaggaaatacactaacactgaccctgactccaagaagggacaggcattgctaggagtttaatttatagcgcggtctccttctgatatctgcaggaagctgccaaaagcagccttaggcttccagactcccacggatcagattttagacttggattttgcagttttccatcacaggaattgggcagagaaaacataaaataaagcaaatcttccaagaggcccagcttctagctgcagccttgtgctctccaccacttcagaggcagccccttaacccctggccttcacagaggaagtgagaaggtgaaagtcccagtctgtgcctctcggccaccgtgccttggatataaatcaatgtgccttctgtaggaaggtcagccactgccgaaggaaatgcactgtgcttccaagggagccatcatcagagcccagcagactcaaaagtggcagggcctgatacttcctacctccgctcccattggactattagctatcgagagatggaggagcctcaggtgactcttgaagtagtaggtaggagtattaacttcgtgttaggtgtgggagcagattactctgtcctgattcaatacaatgggctcctgtcttctcatgatggacaagcccccaaacactcctttttgtatcttctaagttgtcctccagagcctctagctatctcacctgcctttttagtactgtctgattgcctgacctcttactggggagaggtttattgactcaggagaccaagtcatggtcaccttcacagatcataaagcatagaaagtgttacttttgttcctgacccctcaggggaaaaaagaagttaagaatgagctgtcacatttaccagctgagatgttgtctcaaggaaatcttgaggtttgggccacacaggctctgagaaacgcactaaacacctcccccattcaaatccaacttcagcctagtgctcctcgccctcagaagagacaatacattttaaggcaagaagcatgaggggaaattcaaccccttattgccaaattcttgccatatgagttattaaggccatgagagtctccttacaatactcgcatgttaccagattaaaagcctaatggcaagtacagatctgtcagaaccctaagagcattaagaaatgcagttgtcttcgtacacttcattgtcccaaatacttaccaagtcccaggggatgcaagctggtttacattcttatatctgaaagatgcacttttctggatctcaatgcatccagattcataatatgtttgcctttgaatagaatgatccagatacgcattcagcctcaaaactaacctggacagtcatctctgaagggttctggggtagaccctgcttatttgaaaatgctctagttaaggacttaacaaatctacaattggaaagggacacaattattcagtacgtaggtgacttgcttattgctaacccaactaaagaagactcataataatactgttaagttggtaaatttcctgggaacttgcagatatagggcatcaccacacagggctcagattttgactgaaagacttaaatatttggaatctgtcttaacctctggaactgatcaacatccctagaagacaaaaaagttattttagtcacccaatggtccctgtccaaataatgactgtgggcttttttaggagatggctgggtactgctgcttatgggtgcccagatttgggcatgtagccaagcctttatatgatacactaaagggaaagatttagagctcctagaatgtaatgagaactgcaagcaaaccttcaatactctcaaggagaaattgggctctgctgcagaagtgagagtctccaagttggatgaaccattttttctttatgtgaccaaaaagcaaggcataggtcttgggtaatcttgtcccaaaactgggggacattccaaggccagtagcctaattttctaagcagatagaccaggtggcctcagggtggccttgatgtcttagagctattgctgctaccagttttttagcaggcaaagctaataaactaacattagaacagcacctacaggtttttgaccccacaccaaaggaaggtggtcctagaagctaaagggcagcagtggataataggagaacatttatgaaagtatcaggccttattgctggaccctccagacataatccttaaagcctgccaaaccataaacccagctgcttatctgccagagtccacaggtacttctagcctttctggcatacaggttgtattagtctgttctcatgatgctaataaagacatatctgaggctgggtaatttataaagaaaagaggtttaattgactcacatttccacgtggtcagggattcctcacactcattgcagaaggcaaatgaggaacaaagtcacatctcttacatggcagcaggcaaaagggcttgtgtagggaaactcccctttataaaaccatcagctgtaatcccagcactttgggaggccaaggcagtggatgagctgaggtgaggagatcgaggacaccctggccaacatggtgaaaccccatctatactaaaagtacaaaaattagacaggcatggtggtaggcacctgtaatcccagctactcaggaggctgagacaggagaatctcttgaacccaggagtcagagtttgcagtgagccaagatcacgaaaatgcactccagcctgagcaacagagcaagactatgtctcaaaaataaacaaataaaccattagatcacatgaggcttattcactgtcacaagaacagcatgagaaagacccatcccccgattcgattacctctcactgggtccctcccacgatatataggaattatgggagctaaaattcaagataagatttgacgggggacagagccgaagcatgtcataggttatgaaacaaattgattctagcaggctagacttaagagagatgagccccttgaccatcccaaggaagagtggttaacagatgcaagttgttttatgcatcaggagaacaggagggctaggtatgctattagtagtcagcacaagagaatcaaggcacaagccttgctggcttcgacctcagcccaaaaagctgagttaattgaacttagcccctgcagttgggaaaggatttaaaagttaacatttacactgatttcaagtatgattttttagtgcttcatgcttatgctgcaatttggaatgggtagggactgctgacccccaagagttttccatacaacatcattcagattttgagcttgttagaatgctgctctgctgccaaaaagtgactataattaattccagaggacatcaaaagagacactggccatgtaaaaggaaatgcccttgtagatgccaagccaaggcccctgcactgaaagggccaatgaagcttatggacgtgctggtcagcatacatagaactgggccggaatactctgaagaagaataaaaatgggccagggattgcatttcagtccagggcccctctggctggctgaatgatggtaataaattactaatgccaagtaccaatcataggaatataattcagcactttaatgattcttttcaccctagaagggattcctggcttctgttaatgtctcatttgtttataggggtaaatctttttgagacaggaaagcaggtgactcagccctgtgagctctgtgcctgacatgacccaaaccaacagcaattttctccttctccaggtaaacctgtccaaaaaaaaaaattgaggaacctacccaggtgagagctagcaactctaatttactcagatacctttctgcaggagattcaaatatttgctaatgcctactgataccttcgctggttagatcgaggcattccgcaccccatctgaaaaatgtttaccagaagaaataactcctcagtttgggtaatctaaaagcctgcaaagtggcaatggcccgtctttcacagcaggtgtatcccaacacctatcctcagctttaagaatccaatattaccttcactctgtgtgcagaccgcaatcctctggaaaggtgaaagggctaatcctactctaaagaagactctagctaaatcagacgcctgactatctccaacacccatagcttacagcgggtttgaactgctccaaagtaaaacttataataaaatcctgttgagttaacattcggaagacctttcctaagcacagatctcctaatagatgaaaagactcatcaattacaaaaatatgtcgtcaatctaggacaggtgcaaaggcactctgtgaatatggaaacaagagtcttcccctcccacatgggaggaaaattcagtttcagctcagttggggatttagtcttactaacgatgtgggaggaagttctccagctgaccagctttccccaacgtggaaaggaccacagcaagggcacctgagctctccaacagacgttcgatccaagggattcacaggtgggtacacctgtgtggaagtaaagctgttgcttattctgggagccgaatccaaggctgagggaggtgggcgacgggatatttcagcgttggcggagggcggactgggtagctgagcgtctgctcctccttctcgcgtttctcctgccgctctaatcccgccttggccatgaggaaaatagtgctcacgcaggctgggcagtgtgggaaccagatcggcgccaaggttgtatttgactccataaaaattaaaattttgtatgagagaaaaatgtctcaaagtcaaaagtcaacagactggggaaatagatctgcaacataaatgacagacaaaaaggtaatttgggatatagatagatagatagatagatagatgatagatagatagatgatagatagatagatagatgtaaatatccgtttttaacaccatttaaaaaaataccgtcctttccccattgaacagagttgacgcccttgttaaaaatcatgaccatattttttggttctttgtttctattgcattggtctttgtgtctgtctctatgctggtacagcattattttgggtactgaagtttgaaaccaggaggtgttagtcctcttactttgttagtttttaagattgatttggctgcttggggttttctgagatttcatctgaattttagaataggtttttctgtttttacatatattggaatttttacagtgatattattgaatctgtagatgaccatagataacaatggcaccttgacaagattttatcttccagtccataaacacatgatgtcttttcatttatttgtgtcatctttaatactttcatgccatgtttatagtttttgctgtacaggtttttcatttccttggttaagtgggtttctaagtgttttattcttttgatgctatcatacatgatactgttgtcttgatttcttcttcagataatttattgttattgtagaaatacaactgatttttgtgtattgatttttgtatcctgcagtttgctgaattttatttattgcatctgacagtttattacacagaaactaaaacatttttaatatataaggttatgtcatctgcaaacagatacttttactttctaaaaaattggaatatctttaattcttttactcaccttattgttttaactaaccagaaccttcagtactatattaaatagaaatagtaaaagcacacatccttctttttgctcttagggtaaaagctttcagtctttcaccatgttagctgtgtttttttgttttgttttgtttttttgtatagcattatgttaaggtgttttatttctttttatagtttattaagtatattttatcatgaatgtgggttaaattttgacaaatgctttctcttctttgattaagatgatcacatgagggttttttccttctttatgttaatgtgatattgtgctgattttcatgtgctggaacatacttttatttcaggagtcaattatactcattcatagtgtataatccttttaatgtactgctaagtttgagttgctggtattttgttgaggatttttgcatcagcatttataagggatgtttgtttgtagttttcttatggtgcctttgtctggcttggtgtcagggtaatactggcctcatagaataagttagaaaaaattacctcctcttcaaagttttgaaaaagtttgagaaaaagtgatgttaattctgctttaaacattgggtagaattcaacagtgaaaccatctggtccaggcttttctttgttgctgggtttttgattactgatgcaatcttcctgctgaatctccttgctgaataggtttattcaacttttctgattcagtcttagtaggatttttgtttctaggaatttgttcattttatttaggctgttcaattttttagtgtatagttccttatggtactctcctacattccttttttactccaaaaatttgttagtaaagtacccattttatttttgagtttagtaatttgaatattaccttttttcttaatctagataaaattttgtcagttttgatctttttcagagaacaaactaggttttgttgatttttgatattgattttctattctctatttcacttatttccaccgctatctttatcatttttttaattttgctagcttttagttgtccctctttaatcgtccctctttttccctctgtttttagttccttaggagtaaagttgttgatttggtatcttattttttataatcatttatagctataaattttttccttatggtactgtttttgatgtatctcttaacttttggtatttcatgttcttaatttgtctctagatattttctattttctcttgtgatttcttcttttatccatccttgagtgtttcatacctatatttttagacataaaatgtgtaacctacaaaattttcttgatttgttacagctttatttgttgtaaacctttatttcagaattaaatgtgtgtatcaacatttgttatgttctcataaactttgaaatatatggagattcctggtccacatatgtaagtgtctacatgaatattattttgaagcatttaaccttctgttttaatatttcaaaggtctaaatgaaattgagattttggtttctgagatgaaatcatggtaggtgactgagaaatgcttaaaaattagccaaaacttaaaattaagttatagtttacctttaagattcaacctgaataagtcaccctgtattgctggtaataaagaataagactttaatggtataaaaggaacttcagagaatgttttcctttccccagttgacatataaattaaaagatgtaaaaaatttttatggccttatgcattttttactttagaattccaactttttctggttaaattttttgcaaacagattcctgtgtatttgaaagacaaataattttttagttgaaatgcttaagcagttaaataaggccatgaaagtttcttgaacttgtgggaatccatgagaaaatctgacattatgttctattctcttggaaggtagaaatatcgtttgacttctgttttgctgacaagaaatgtcctgagcaagactacctgggacaatgacctcacacatggaaaactttggagcccatctgtttccaatctgcttttttccaaaaattagggaagttcagttttccctttgatactctctgttactaccaatcccaatgccagggctgtcctgcttctacaagtgacaatgacaaatatagacctgaagaaagatgagctgatggctttcccagcttattacctctacttgggggccttatctcacatacatggactcaactcatagactcagctgggtgaggatctattattcagctacattagaagggactgcttaagactcaggtgtgtggtgaaatgaggcagaattttctcaatggagtgctaggagaattttctcctcataactaccatcttactatcactaaatcatagctaaaatgaggaaattattcaagaagaaatagaaatgtaatcttaggaagacataaatttagagatttgtggagagctcttcataattttatggtgttctctttgagctgggattatagttgacttttcattataatatattagctgttctagactttatgcatttatgtaaagttttctttgttgtactttaagttctgtgatacatgggcagatcatgcaggtttgttacatagttatacacgtgatatggtggtttgctgcacccatcaacccgtcatctacataggtatttctcctaactctattcctcccctagccttccaccccatgacatgacccagtgtgtgatgttcccctccctgtgtccatgtgtcctcattgttcaactcccacttatgagtgagaacatgcagtgtttggttttcttttttctttttctttctctctctctcttttttttttttttttttttttttgagacaaagtttcactcttgttgcccaggttggagtgcaatggcgtgatctcggctcaacacaacctctgcctcctgggttcaagcgattctcctgcctcagcctcccaagtagctaggattacacgtatgtgccaacatgcctggctaattgtttgtatttttagtagagacggggtttctccatgttgggcaggctgatctcaaactccccacctcagcctcacaaagttctgagactacaggcatgagtcactgctcctggcctggttttcttttcttgtgttagtttgctgagaatgatggtttccagcttcatccatgtccctggaaaggacataaatgcacagtattccatggtgtatatgtgccacattttctttatccagtttatcattaatgggcatttgggttggttccaagtctttgctattgtgaacagtgctgaaataaacatgcagtgttgaaataaacatacagtgcatgtgtctttatagtataataatttataatgctttgggtatataccctataataggattgctgggtcaaatggtatttctggttctatatctttgaggaattttcacactgtcttccacaatgactgaactaatttacactcctaccaacagtgtaaaagcattcctatttctccacagcctcatcagcatctgctgtttcctgactttttaataatcgccattccaactggcgtgacatggtatctcattgtggttttgatttgcattcatctaatgaccagtgatgatgagctttttttcatgtttgttggccacataaatgtcttcttttgagaagtgtctgctcgtttcctttgcccactttttgatagggctgtttttttcttgtaaatttgtttaagatctttgtagattctggatattagctctttgtcagacagatagattgcaaaaattttctcccaatctgtaggttgtctgttcactctgatgatagtttattttgcgtgcaaaagctctttagtttaattagatcccatttgtcaatttgggcttttgttgccattgctttttgtgttttagtcacaaagaatttgcccatgcctatgtcctgaatggtattgcctaggttttcttctatggttttaggtcttatgtttaagtctttattctaccttgagttattttttgtataaggtataaggaagatgtccagtttcagtttctgcatatggctagccagttttcccaacatgatttattaaataaggaatcctttccccattgcttgtgtttgtcaggtttgtcaaagatcagatggttgtatgtgtatggtcttatttcagagttctctattctgtttcattggttgtttttgtaccagtaccatgctgttttggttactgtagcattatagtgtagtttgaagttgggtagtgtgatgcctccagctttgttctttttgcttagaattgccttggctatttgggctcttttttggttcatgagaattttaaaataatttcttctaattctgtgaagaatgtcattggtagtttaatgggaataacattgaattcttttataaattactttgggcagtatggacattttcaggaatgaattcttccctatccatgagaatggaattcttctccatttgtttgtgccctatctgatttctctgagaagtggtttgtagtcctccttgaagaggttcttcacttctcttgttagctgtattcctatgtatttgattctctttgtagcaattgtgaatgaagttcattcacgatttggctctctacttgcctgttgtttgtgtataggaatactagcaatttttgcacactgattttgtatcctgagattctgttgatgtggtttatcaacttaagaagctcttgggctgagatgagggggttttctagatacaggatcatgtcatctgcaaacaaagataatttgacttcatctcttcctatttaaatacagttatttatttttcctgcctgattgccctcgccagaaattccagtactacattgaataggagtggtgagagaggccatccttttcttgtgccagttttcaaggggaatgcttccagcttttgctcactcagtatgatattggctgtgagtttgttatatatggctcttattattttgaggtgtgatctttcaatacctagtctattgagagtttttaacatgaagggatgttgaattttattgaaggccttttctgcatctattgagataatcgtgttgtttttatgtttatttctgtttatgtgatgaattacatttatagatttgcctgtgttgaaccaaccttgtatcccagggatgaagccgtcttgatcgtggtggatcaaggtacccttatcagtcttaagttcagtctttttacataatcccatatttcttgaaggttttgttgttctttcttttttattcttctttctctattcttctcttcctgtcttataacagacagatagttttgaagctctgagattctttcctccacttggcctattctgtgagtgatagttgtggttatgttgtgaggttctcatgttgtgtttttcagctccatcctgtctctaaaatgaatattctggttatcagctactgtgttcttttatgatttttagcttcttgcattaagttagaactgctcctttagctcagagaagtttgttattacccacctcctaaagcctacttttgtcaattcagccatctcagcctcgggtcagttttgtgctcttgctggggatgtgtttttgtcatttagaggagaagaggcattctgcctttttgagttttcagcgtttttgtgttgatgctttctcatctttgtgggcttatctacctttgatctttgacgttgctgacctttgaatggagtttttgtggggttttttgttgatgttgttgttgttgtgtttgtttttaacagtcagaccactcttccctacggctagggctgatatgaattttgggggtccactctggaccctagtcacctcagtctctcctgcacctggaggtatcaccagtgaagtctgtgaaacagcaaagctggcaacctgatccttcctctgggagcaccagtccaagggggtactgacttgatgccagctggaacacttctgtaggaggtgtctggagactcctgttgtgaggtctcacccagtcaggaggaacaggatcagggactgcttaaagaaacagtctggctgccctttggcagggcaggtgtgttgtgctgacccccaggagtctccaaagccagcaggctggaaaggctcagtcggctgaactggggagaaagcagctacccttctccctcgggacttcatcccagggagaaatcagagttctgtccatagaactctggctggatttgctaaaattctgatggggaggccctgtccagagaggagggatggattttggtctcacttaaagaagcagcctggccatgatcagtcacaacatctgtgctgtgttatggatgactcctcctggtccctggtaccagcagtctagagtggccaactcaaaccacagatagaacggctgcccctccccctgggaactcggtccacctccggctgtctccagcctgctgccgctggccagctggaattccaagccaatgggtcttgtgaggtgctgtgggagtggggcctcagaatgatatcacttagctccctgcattcagcccctttcctaggggaatgcacggatgtatctcccgctttgctggaattctcagggcagagtatgcaaaacgcctgggcttccatgcatgccccagtaacccagccagcgctttgctgagactccacacagctctgtgcttcagacccaaggccgtggtggctgagctcatgaggggacctcctgatctgcaggtagcaaagatccacgggagaagcatggtttccgggcagagtcgcacaatcactcatgacctcccttgcttgagagtgggggctcagctagctctgtgacacacctaggtgggccattgccccacttgcttttcctgactctctgtgggtcgagctctctgcctagtcagtcccagtgcaagaacctgaatacctcaattgaaggtgcagaattcacttgcagttttcattgctctccatgagagccacaggccacagctgcttctaatcggccagcttggccccatctaaagtatgatttcttaatacatgagatgttttaaatacataacaataatgatatttatcaaaaataatattttgtttcaatgtgataaaaattgctaataaatcaattctcttttggttatcacaaagctatctggaaatgtaacatctgccatttataaaatttttgtagggttaatagaactttacttgaagggaggctggcaatatgcatcatgacttcaaacactgccagtgaagttgtggagtttgaagtggtactcacatcttgttactgggattataaatttgtacaaactttatcaattgtgattaaacaatatatacccaaattataaatggcaatactctctgattcagcaatttcatttccagaaatttaccctacagacatactcatgatgcctggaattatgtatgaatgggagaaagtattataccacctttttaattaacaaaagtctagaaatcaccttaatgtttatcaatcacattaatgattatcaccttactgtttattgaaattatggctattcatatgatagaatactatgcagctatttaaaaaaataaattttaaagggatgctcaaaaatgatgtccaagatatctacaaagtaaaaaacctggttgcagagccatgtgtctcatatgtctccattcctataaaatcagagtgcatataaatgaatagagtatctctattaaatggtaactgttacaaaatttaaagttaatgcaggcaaggaatttcttttttaatgctaaaactccaaggaactgcacaaatttgaggatttccaacacatgtcaatctatctttgaacctacagattttaggaaatgagacttttgaaaaatcaagcattaatattcctagctacagttgtttgggccataattagaatgatccattctttggaagtctgtaaaatttgctcatacaaccatctgggcctagtccttcctttgtgaaagattttattttactagagattttatgttcttcatgttgtagtacttcttaggttttctatttcttcctgattcttgagtcaattttggtaccacttagtaccccacaggttgcttgggctcagaacacatcagtcaaagaaagagagaagaaaggaaggcaggaaggagggagaaaggaaagaaggaaagaaggggacaaagaaggaaagagagaaataaagaatgagagaaagaaggatggagggagagaaagatggaaagagagaaagaaagagagaaggaaatgagagagaaggaaggaaggaaggaaggaaggaggaagaaaaagagggaaaaagagagaaggaaagaaacaaggaagcagggagggagagaaagaggaagggagatgaaggaagagaggaaggaaggagagtgggagggaagggagaaagagagggagggagggaaagaaagaaagagagaggtgaaaggtggggacggaaagggaagaggagccagccacaggctacaggctgtttgttcactcttttacttgaaccaggcattctgccttttaaatattccaccttctgccatgagttacactcttcaatattcaaatattcattcctcagagcattcaaaggtctatgtgtgccctgccatgatggagcatggcttcagctctcaaacacaactctcagccaaaatattcatgactggtgcctcccatatactcatcaatcccccatatatggtctgcatgtgtcccccagagctcacatgttggaaacttaatcctctatgtgacagtgttgagaggcggggcctaataagagtgattgggttatgagactctgcccccatgcatggattaatgtcactatctcaggagtagtttagttatcttgggggtgggttagttatcttgggagtgggcttgtattaaaagcaagctcagccccttttgctctctttctttctgaaagtcttgttctgctgccttcagtcatgagatgacacagcaagaaggctctcaccagatgcagacccctcatagttggacttcctagcctccagaactctaagaaataaatttattttatttatagattccctagtctatgatattctgttatagcagcacaaaatgggttaagatgccccattacatggagagtgctgatccacagggttgagatgattgacttagggcttggagtcttatacaacatccctatgggagttggcctccatattccctatcttccaggaatctcaaatggtgatctgagaccaaaatatagcccagatattttgcatttggcaatattgcccacttttccacaactttgtcatgacagctttgatgtgctcccttttatgatccctgaaaggatatgagttcaagatccttcaaggttacaatccaaggatagaagagcctagaaaagagtcccatcacctgggtgatcagtgcagaaatatgtcacaaagcctccattggcaaagcctagacaagagttacgtcacctgggtgatcagtgcagaggtatgtcacaaagcccccgtagacagagcctagacaagagttacatcacctggatgacaggcaaacaacaatgacaacttattttcatccccacttcagtctttgaggttagacagacctggattcaaatccaagctccacccctcgctgtgtgagcttgctcatgctgctaacctctctgagacttgactcttcatttgtgaaatgaggataaaaccccttctctcgggggctgtgccaaggatgaaatgagtcatgcattggtcaggacaggtgatgctgtataacaaacaagcccacaatcctcagtggctttaacagcaaagttgacttcttttttttttttttgtgggggttggggtgtggtggatggagtcttgctctgtcgcccaggctggagtgcagtggtgcaatctcaactcactgcaacctccacctcctgggttcaagagattctcctgcctcagcctcccgagtagcagggactacaggtgcacgccaccatgcccagctaattttttgtatttttagtagagacggggtttcaccgtgttagtcaggatggtctcgatctcctaacctcatgatctgcccacttcagcctctgaaagtcctgggattacaggtgtgagccactgcacccggccttgacttctcaattgatttcacatccatcacgggtcaacaagggggctctggtggtcatagtcattcagagactcaaacagatagacccttatcccagaagatgctcccacagttccagaaatagagcaaagaaaacacaatcagccatgagccacttcttaaatccccagcctggaagggatacacatttcttctgtcacagctgttgcccaaaatgtctcaggctgccgagtacagtggctcacctctgtaatctcagcattttgggaggcagaggcgggcagatcacctgaggtcagaggttcaagaccagtctgaccaacatggtgaaaccctatctctactaataatacgaaaattttccagtcgtggtgacggatgcctgtagccccagctactctggaagctgaggcaggagaatcacttgaacccgggaggcggagattgcaatgacctgagaccatgccactgcactccagactgagtgacagcgtgagacttcatctcaaaaaaaaaaaaaagtctcaggctatgtttgaactaagagggtagaaagaatagtcattttggttgccacaaaccttcaaaacaaagatgcagatcattgatgtaaaattacagttagttctttcccactccttttcagcttctcttcgttaccatgagccagcgtctctagtgtcagtattcagtctattgcctcccagctcctagtgcacctttcaatatgtgcactgtgataatctgggaaacactgttcaatataccttctggaagtgaacattctgcaggcctctaggtagaggatggagagactgcaggggacaggagctctctggctgggctttggtcatgttcaagccccaaccacagaccaaggcgtggtccctcagccaccttgtagccttggcttgcaacatctcgacatggaaaccaaaacgcggcagggcccatgtgatatgaaagttcttgaaaagttgcccagaccccctcttgtatcccttgtgcaacctgcacacagtgacctgtagtctagagggtctgcacagaactgccattccttctgccagaccctgcgggacccacgcgttctgaaggcttcctgccctacaaaggcagccagactcccgccatgcatccctgcaccaggggctcacggccagctccctcacctgcactccagcggctcatgcacagctccctcacctgccccaacggctcacggcctgctgcctcacctgcaccaggtgctcacggccggctccctcctctgcacaccagcggctcaccgctggctccctcacctgcaccagtggctcacagcaggctccctcccctgtactccagcagctcatggccagctccctcagctgcactccagtgggtggcctagtgctcgtgcaaaagctgctgactagctccagcctgcccaaacccacaaacgtctcttatgtggtggctgaaccacatttaatgacatctgaacacctttcaaatctgtgcttccttgggtacctccctctgcactagggcaccaggcagagttgctttatgtcttacagtgactcttttatcatagttgcaatcctttatactccacttccccattagacccactgtgtgctttctatctttgaatgggacccaggctgctacacaccctaacccatgcacattgcacttcattagttcctcactattggccaaagatcatgctccaccacccctctcttcccccgactctctttgcttaattgaaacccccaaatgccctctttgcgcccaaagcttacttgcttttccttccctatattcttggccagacacaaaaatctgattctctggcaaatgcaaaaacggggagaaggcaggggaaccatttctcctcccttacataagcactgagggtaatgtcattccattgtgtgaggaataaaaaaatgaggcatagagagctgccatgatttgcctggaccaatgaagctgtcatggcagaagtggaacaaaggtttaggtgtcccgaatgtcagtccagctcctatgccttcagaacgtgctgtggagggagacacctggggaccccagtcatgctgagcactcagggttacccaggttctgagagtggggacgtgacaggctgagttgactcagtccagtcctcctctacaaaataaggatggaaaccctcacataatagaagtgaagacagggaacaaatccaggaaccattaagaggctgatgcctggaaggcctgggcagaatgacgggagattggagcagaacaggggccctagatggggacaaggggaaggaagtggcctcagtggccagatgacacctatccactgcacagacgctggagccttgagttccatctagtccttgtcaactacaatcattctgccctatggctcaacgagtcctggagaaaatgtgttttctgcagtctggggaggtgagagtaaaacaattcagcctcaagaagttgaaagcccaggaaatcatagcatgtggagatgggattcatacttaaacttcctgcccttgagttctggtttggccacttgactcactttggccaatggatgtggtaaagtggtagtctgcccattctgagcctgggtggtaagataagagatcttcacatttccctttgttctttgcactcctgccattgccatgagaagaaggcaccctggcaggccccgaccccaggaggatcggagacacttggagcatatccagctcagccaccacatttcgagctgaaacctcccaagcaacccatgctcatgagtgagaaatggtggcctatggtcgtaggcctctgaggtgtggggttacttgttacaaagcaagagttaactactagagatttctacctcacatccctacgaaacaaagaacaaaggaaataaaacaaaatatgaaaagcagatttccaatttttagaagaaacagaggacatattttatgacactaagcagagaaaaattttttttaatatgacacaaaacacagacaccataaaagaaattactgataaattcaattgtattaaatgtagaagatttgatctgacaaaagagaccatgaatacagttaaaagacaaagacagtgcatgatatggtttggctgtgtgtccccacccaaatctcaccttgaattgtcctcccataattctcctgtgtcgtgggagggaactggtgggagataattggaatcatgggggctgttcccccataccgttctcctggtagtgaataagtctcacgagatctgacggttttatccggggttccacttttgcatcgtccttatttgtctctggccactgtcatctaagaagtgcctttcacctcccaccatgattctgaggtctcttcagtcatgtggaactgtaagtccaattaaacctttttttcttcccactctgggttatgtctttataggcagtgtgaaaatggactaatacagtgcaccaatagggaaaacatatttgtaaggtatttggccaaaaaagcattgatatccagatcattaaaatcaaaattggtcagtcttggtgacgcatgcctataatcccagcattttgggaagctgaggcaggtggatcacctgaggtcgggagttcgataccagtctgaccaacatggagaaacaccgtctctactaaaaatacaaaattagccgggcgtggtggcacttacctgtaatcccagctactcaggaggctgaggtaggagcatcgcttgaaccagggtggcggaagttgcggtgagccgcggtactgccattgcactcccacctaggcaacaagtgcaaaactccttctaaaaaaaaaaaaatagcacttataagtcagcaaggagaaaccaaagatccaacagacatatgggccaggagcaattcacagagaaggagaccggaagagctggaaaacacaaggcacgcgttcagctacactgcaaattccaggaacaatatcaaaaagtgcgataacaaatattgatgaagatgagtgaagatggatgtgagcactactggcgaggggcattgtgaggactccagccccaaggtcatctggctgagcttcctaggaagggctgacaacagacctgtcccaagacccgaagcctcaccaggctacgtgcaggctttggaccagaacatcagcatcaccttggggtgggggttgcagggggaggcacgcatcctctgctcaccagaaatgcagaattctagattcatctggaagaaattgttgaagggaaaagcaactttcaggagagtatgtatggactgctgtttgtataaaattgcaaaaacagaccaaaaaacactatccattcttcatggacatgcactctaggtattaaacatggatgggaagacacacattgacttcagaatagtgggagggaggtggtaactggactggaaaaggggcatataactcgagtgtcagcttgaacattatggctgaatctgtaatgttttcttccttaaactctggagcaaatgcatccaaaagttaccatatttgaattttaactgggaggtacatgaaagtttaataccattatcctctatgcagtcctgtgtgtttgtaatattgagccatattttttaaacacttgactcatcatgaaaggaagcttgcctacatggtaccaatggttatctttaggtagcagaattcaagactgattcttttttctttttttcctacttgtatgttatctctatttccctgtgtgaggatttatgactgttgtgatgaaaaggctagcatcctaactccctgcatcataagcacacaccatgccctggctggcaggatgaggaggagggagcgtgtcttttcacctggccagccctaggcaactctgcagagaaagacacaggcacttcccctctgcagccaaagagttaagaaggctcgatgtgaaatgaatcattccaggggagctaaatcccggccttatctaattctgtatcctgaggctgattaatttaaactcaaaaataaaacaaacatcatctttaaatagggattaaatactcagcggggtccttagttgaacaaaactgacatacattttatggtatggattcagggggcccggggtggggctagggctatctgtggggatgctcgctgagctaaggagagaaaatcaccagtgctcccggattccggagtgcattcacctttagcttcttctctggatacccgcagaaaaccaaagagccaccctgtggcaggatcttcacacaggaggtgggcttgtgccctgtgtccccgagggagaaggaattatggagggagtgggtgaagagtttggaggaagtccctgatgttcttagaaaacagtaggaaacagattccattggttgggcattgttcccaaataggagacaagagcatgaactaaaaacagagactcccagctccatccatggtccctgagttcagaagagaacccagggaggtggggcaagtaaaaaattgagtgggctatctgacatgtgcctggagggacccacgaacctgagtgaggcatgagagtgggcagctggtggatttttccaggcctgcagcacaaagccaggcggacgtcctaagaacaagccatgtctgcagaggcctctactgcatccctgcctcatgggcacaatgtcacagaacagaattacatcatgtgggaggccatgtgcagtgtaagtgtcataatggagctggacccagaaggtcccagacccaggtccagctatgtctctgctatagtcaatgtttgtgtgcccctaaaatccgtgtgttgaaatctaacccctgataggttaggtttgaattaggaggcaaagactttaggaagtgatttcatcatgaaagcaaagaccccatgaatgggataagtggccttgtaaaagggagtcaagggagcttgttctctccttccaccatttgaggacacagctaggaggtgccctctataaggaacaggtactcaacagacacctaatctgccactactttgaccttccacttgccagcatccagacctataagaaataaatttctgctgcttataagccccccaggctaaggtattttgttatggcagcccaaatggaagaagacggtctctgaccatcttgagcaactcacttatctgctgaactctccacagatttaactgtgatgaaatcccgtcaacagatgtatattgaacacctactgtgtataaggacacattgtgttattggatagggtataaagaaagtcacagttccccagaggtaggcactgccatagctgaagagcaaaccctagttgctgtggccaacgggggaagggatgggtgtcagagaaaaagagaacatgctagagtccatgtctgcagcaatattggaacgtctaatggatggttccaaaagtggtgactcctcatcttcttacaaaaactcatagttgtccctgtgtaaagtcttcccagaagtgcagggcagttgagaatatgcagatcagaaaagacaagaggacagagagagcagattcttggcatcagcagccacggacttcttgcaggaaggaaagtatttctcctggatccctgcgtagcagataaacgtacagaaatacatttgttggctatttgattcatagactttgaacatttgcagaccgagaggctgagaatcttctccaatcagacggtgtggggcgtggaagtacagaaagggatcaaaggaggaggaaaacagagcaatgagaagggagctctcagcatgaccaacacagagacctgggtctctgctaccaacaatatgagctaatgtataatgattgcaggtctgtaaacagcaggctttccatatcacatgtggcaagctctgatgacaaccctgtgtgacaggtattcttatcagaggcagagagttgttaaataatcacacacaactggtggaatgccggagagatttgttttacttggtcatcttcctgtttgctttctatttgtcccatctatagttggttctccttttcctctttgacttcttttgaatttgttgagtatttttatttcatttaatcttctttgttggccttttacatataactatttggcttcgtttggttttgagttttaaccatttctctatagtttatggtatatcatatggtttggatctgtgtccccacccaaatctcatgtggaaatgtaatccccagtgccaaacgtggggcctggagggaggtgattggatcatggagccagtttctcatggtttaacaccatccccacttggtactatatagcgagtgagttctcacaagatctggttgtttaatagtgtgtggcacctccccctctctctcttcctcctgctccagtcacataagatgtgcctgcttcccctttgccttctgtcatgattgcaagctccctgagccctccccagaagccgagcagatgacagaatcatgcttcctgtgcagcctgcagaaccatgagccaattaaacctcttttcttcataaattacccagtctgagacttttttttttttttgagacatagtctcgctctgtcgcccaggctgcagtgcagtggtgcaatctcggctcactgcaacctctgcctccctagatcaagtgattctgctgcctcagtctctcgagtagcttagctgggactacaggcatacgccaccaggcccacctaattttttttgtatttttagtagagacagggtttcaccatgttggcaaggatggtctcaatctcttgaactcataatccacatgcctcagcctcccaaagtgctgggattacaggcgtcagccaccatgcccattcccagtctcagacatttcttttttttaaatttgtttattatttttttaaggtattattattatactttaagttttagggtacatgggcacaatgtgcaggtttgttacatatgtatacatgtgtcatgttggtgtgctgcacccattaactcgtcatttagcattaggtatatctcctaatgctatcccttccccctcccaccaccccacaatagtccccggtgtgtgatatctcccttcctgtgtccttgtgttctcattgttcaattcccacctataagtgagaacatgtggtgtttggttttttgtccttgtgatagtttgctgagaatgatggtttccagcttcatcgatgtccctacaaaggacatgaactcatcattttttatggctgcatagtattccatggtgtatatgtgccacattttcttaatccagtctatcattgttggacgtttgtgttggttccaagtctttgctattgtgaatagtgccacaataaacatatgtgtgcatgtgtctttatagcaacatgatttataatcctttgggtatatacccagcaatgggatgggtgcgtcaaatggtatttctagttctagatccctgaagaatcaccacactgacttccaaaatggttgaattagtttacagtcccaccaacagtgtgaaagtgttcctatttctccacatcctctccagcacctgttgtttcctgactttttaatgatcaccattctaactggtgtgagatggtatctcattgtggttttgatttgcatttctctgatggccagtgatgatactgtggttttgatttgcatttttctgatggccagtgatgatgagtattttttcatgtgtttttttggctgcataaatgtcttcttttgagaagtgtcagacatttctttatagcagttcaagaacagattaatacagtatatgtatttaacttagcattggctgccatcaacattataccacttcacatagaggataagaaccttaaaacagtgcccattcatttccctccttttgggttttgtgttattgttttcatgcattttgcttctgtatgtgctgtaaactcacattaatttgttatcatttttgtcttaaacagtcaattatcttttaaaaatccttcttaatgttgtatttttgctcacacatttgccatctctggtgctctacattcttttgtgtagatctggaattccatctggtttcactttccctctgcctgaaggatttcctttaatattgcttgtagtgaggacgtgctgttaatgcattcttcaagctttttaatgtctgaaagtctttatttcactatcatttttgaaagatatttttgctgggtgtagaattctagactggcaatcgttttatccttaagtattttatggaagtcactccactatcatgtggtttgcattatttcttttctttgtttttttgagacaaggtctccctctgtcacccaggctgcagtgcagtggcatgatttcagctcactgaaacatttacctcctgggttcaagcaatcctcccgccccagcctcccaagtagctgggactacaggcatgcaacacgacacccagctaatttttgcattttatgtagaggccaggttttgccatgttgcccaggctggtctagaactcctgggctcaagtgatcatcctgccttgacctcctaaagtgctgggataacaggcatgtgccaccacgcctgaccttgcgttctttctaaccagatgtctgccttttttttttttttttttttttttttttttttttttgagacagagtctcgctctgtcacccaggctggagtgcaatggtgccatctcagctcactgcaacctccgcctcccaggttcaagcgattctccctgcctcagcctcctgagtagctggggttacagatgcgtgccaccatgccctgctaatttttgtatttttagtagagacggggttttgccatgttgcgcaggctggtcttgaacttctggtctcaagtgatcaccctgactcagcctcccaaagtgctgggattacaggtgtgagccaccacgctcagcctattttcatctttgttcctctctgtataatgtccttttccctttggtaacctttcagattttctctttgttactgggttggggcaatttgattatgatgtgcttcagtgtgtcatcctcatgtctcttgtgctaggggttcgttggttcttagatctctgggtttacagtttttctcaaatttaaattttttcagccagagctttttcaaatactttttcttctactcctccccaccttcttcaggaactccaattccacatatattagtcctgttggtgctgattttctgttcagttttttccattattttctccacgttccatttttgatagtttctgatgctacatcttccagttgactaatccttttttgtataatatctattctacattaaatgccatttagtatatttttcatctcagacattgtatttttcatctctagaaattcaagctgggtcttccatgtctctacttccatgttctagcttccctttaccttcttcttgtggaatgttatcattacaataaatgttttaatatcgttgcctactaattctatcttatttgacatttctgtatctattgatcaagttttcttcttattattgagacatttcctttttcttcacatgcctggtaattttcagctggatggcagacaacgtgaaatttatcttattgtgtgttggatattgttgggttcctataaatattattgagctatgttctaggatgcagttaaattatctggaaagattttggttctttgagggttttctttgaggtcttgttaagtaggaccttagcagcctcatcctagatctaatcttccacactactgaggcaattcttttctgagtgttccatccaatggtccaggaagtatgatttgtccactgttgctggtgggaacaccaaatatgcctagttctgtgggaggttcaagcattgttctttctgtttccttcaggtattttttcccccagacttgtagtttacacacatacgtgtgctgatcagtatttagctgaagactctggagcttttttgtttcgtgtctttgtccttttcattccctgaatactctgccctgcagagtttatctgagcttctttagtctccctggactcccagcttcgtctcctcaactcagaaccatcaccaggctcagcctgggttttccctccttgagctgtggcctagaaactgtttgcctttggtcaccgcacctgggcagtccagagtcaggagaaaccctaggccatgtggcagaatgcccactgtccccacttcaccacactgtactctctccatcccgtgctagctgcagccacgctgtctcacagtccagaatgctagccagagaccaagctttctgcagtgtcttggctggggctcacagataaggatggccaagcagtgctcccagaagccagcagatgccatcaatcagttttacatccaccaggcactgagaatctctggacaccagaagtgtcctctgttgccagagctgaactctcaagtgaagactccagaaggccctgaaatgtgggcaggctcccattattgcctgtctgtggccacaaggacacagactctttccatggctggtgagatgtccagcacactgggggctctggaaagccccttttcaactttaggccttagctgagctctccatttacctcagaccaggcagtgcacattatgggggacaccgctgggtgctgggatgaaaatggcactttgcatgtgagctaggattgagagcccaccactctcttccccagtgaggcggtggccagttaccatctctggcttctgtccccttaccagcctcctctgctacaattgcatttctggcaggcagtggatcagggaagcaccggcagttgaggaccatgtggagaacaactactggccaagcattcccaacctgacagcagaacaggggtacagcagtgctgaggtgaacttgacagagaaatttgagaccatgaaggcagccaacacttccaacttatcacaacctgcctctcacatagatttattgtggaagaactcaaccatctccgtgtcaacaagaaatggtcctcactctaaaccatcacccttggatttagatcatgaggctgtcctgtctttagtatggaattgaaaagctttaatttccacaaaaatgtaaggttttgggctacagccttattaaaacaaacaaatatgagcatcgtggtctacagttggagtatctggggctctaaacaaactgctacttgaaagcataatcactgtctttttgtttgtttctttagcctggtaggacaacgtcagaaatttccttagtcataaggaatataaaacatagtttgaacaaaagcagcaataaagctacaaactattttttggtgtatttgcttaagtataagatagctgattggggctttatcatgtaacgttagtttgcttagttttcattaagtttgttaaacttgaattgtgaataaatatatggctgattcatatgtagttaaactgcacattgacataaactgtacattaaaagttgctgcacactgtcatccaaaataatacttaggtaaaaccaaaaatactataaaccaatgtcaaggaacctaccctaaaataaaaatacagttaacatggaattgcaaaactagaatgggagaattatttacccataaaatcttgtttggaacattgatataacactagaaaagaatttttctaaataaccacaatgttcaacagtgactgtgcacctgtgaagaccaggcattttgaatgattgccctgtggtgtatggcagtacaattttacagaaatgcactacaataattaataaaattctctaatgggaagattttaatgaataagtatttatgctattaatatttataatattggtgctattatttcacaaaataaaaaagctgtattacagcctttaaagcaaataatagccttacatttctaaataaagaaaaaatataaattttatgaaatatggttaagagtaattgataaaataaaaattgtggcataaattatatcatagtttggatagaagttgaagaaagtggatgaaaattttaatgagccctttttgcgtgcactaaacttaatcttataggtgaactttataatatataagggtacctactagctatctaatttaccttttacacaatgtataaatcctagcctattggtcttaatatttgcacctaaaataacacacaaacatacaagagaacaaaataaggaagaaatgtatggagacagtgatattatcaagatggtggaatagggggttcctacttttgtattcccctgcagtaataaaaactagtcagccatccatcaaccaaagtaactttacgagagatccaggcacaatggctcatgacggtaatctcctccattcaggaacctgaggcgggaggactgctccaggccaggcgttcaaaaacaacctgggcaatatagtgagctttgcgatacagggcattatgaaacctcgctaaaacccaagatagaaaagagtcattttgagaagccaggccctttggttaataaggtgtcatattatccaaaacaatctgtaagttaactcaaatccgtatcaaaatccctgtcccactttttatagtaatagaaaatgcaagcctacaatgtaggctgaatggccaagccaatcatgaggaataagaaaaaagctggggacatcatactcgtgactcacacaaaacagctcaaaagtcactgtttgtagataacctggggaacacctgctaggtacacagtgggagccacactcacccacacatctgctattaggcccagcatatagcagaacctgccctagtgcctgcttcacaaaacaaagccctgaagacaatccagcctgcccaaaaacccaacagaactcacaaccacatgtgctcctggtaacaagcccactaaaggtaaaacccacttcagattcggcagccaccttgtgatgcagctacaagcctttttactgcaaacccagtaaagatctcatcagccttgagacccaacagatgaagatctttacctactaaaaccagtttacaaaaatgaaaagagctggctgggcacggtggttcacacctgtaatcccagcactttgggaggaggaggtgggtggatcacgaggtcaggagttcaagaccagcctggccaaaatggtgaaacactgtctctactaaaaatacaaaaattagccgggcatggtggttggcacttgtaatcccagctactcgggatgctgaggcagagaattgcttgaacccaggaggcggaggtagcagtgagccaagatcgtgccacagcactccagcctgggtgacagagcgagtctccgtctcaaaaacagaacaacaacaacaacaacgataaatgaaaagaggtgtttgctccttcaaatgcacaaacaccaatgcaagtctatattatgcccgttctaacggttctattttaacatagaatacgaagtcctacatagaataattaagtcctacgtcaaataattaagcaagaaaagctaaaagatccaaattgaaaagaagaaataatgtcactgtttgtagatgacataatgttatatataaaaaacataaatagtacatttaaatactgcatttaatgcatctatatataaacagtgcatctaataaatgcactcagtaaagaagcagaatatacaattaacatacaaatatcagttttgtttctatatgctagcaacaaaccagtaaaaaagaaaaaaaatctcatttacaatagcaacaaaataatagatttcttagcaataaatttaacaaacgcggtgaaagatctttacaataaaaaataaaatatattgatgaaaaaaattaaagaagatacaaataaatgtaaatatattacatgtttatggattagaagaatattgtctaagcaccatgttatccaaagtaaagtgtagattaattcaacttcctataaaaattcctgtgccactttttacagtaataaaaaataaagtctgcaatgtatataaaactataagaaatattgaaaggccaaagaaatcacgagaaataaaaagaaatctggggacattatactttattatttaaaactacatttcaagactacagtaaacataatagaatggaatgtttataggaacaaacacaaaaaccaatggaacagaatacagagcccagaagtaaatctatgcatctaaagttaatctttgaccagggcactatgaatatgcaatacaaaaagtgtagcctttcaatacttagtgctgggaaaactggatactcgcaagcacaataataaaacttgatcatatttcttatgccagacacttaaaatacttaaatttaatacataaatccttaaaagaaaatcttttaaaaagcatatgaaaagcctccatgatactggccttggcaattttttttaaatacgatatcaaaagtatagcaataaaaccagacataaagttgtagtgtattaaactattgtgcacagcaaaaaataagaaaacatttaagatgggataaaatatttgcaaactatatatgatgagaggttaatattcaaaatatagcagaaactcatacaaatcagaagctaaacaataataattataaaacccaactaaaaaataagcaaaagactaaacattattttttaatattattatactttaacttttagggtacatgtgcacaacgtgcaggtttgttacatatgtatacatgtgccatgttgctttgctgtacccattaattcatcatttagcattaggtatatctcctaatgttatccttcccccccccacaccccacaacaggccttggtgtgtgatgttccccttcctgtgtccatgtgttctcactcttcaattcccacctatgagtgagaatatgcggtgtttggttatttgttcttgcgatagtttgctgagaatgatggtttccagcttcatcgatgtccctacaaaggacatgaactcatcattttttatggctgcatagtattccatggtgtatatgtaccacattttcttaatccagtctatcattgttggacatttgggttggttccaagtctttgctattgtgatagtgccacaataaacatatgtgtgcatgtgtctttatagaagcatgatttataatcctttgggtatatacccagtaatgggatgactgggtcaaatggtatttctagttctagatccctgagggatcaccacactgacttccacaatggttgaactggtttacagtcccaccaacagtgtgaaagtgttcctatttctccacatcctctccagcacctcttgtttcctgactttttaatgatcaccattctaactggtgtgagatggtatctcattgtggttttgatttacatttctctgatggccagtgatggtgagcattttttcatgtgttttttggctgcataaatttcttttgagaagtgtctgttcatatcctttgcccactttttgatggggttgtttgtttttttcttttttcttgtaaatttgtttgagttcattgtagattctggatattagccctttgttcgatgagtagattgcaaaaattttctccctttctgtatgttgcctgttcactctgatggtggtttccttcactgtgcagaagctctttagtttaattagttcccatttgtcagttttggcctttgttgccattgcttttggtgttttagacataaagtccttgcccatgcctatatcttgaatggtattgcctaggttttcttttagtgtttttatggttttaggactaacatgtaagctttaatccatcttgaattaatttttatataaggtgtaaggaagggatccagtttcagctttctacatatggctagccagttttcccagcaccatttattaaatagggaatcctttccccattgcttctttttctcaggtttgtcgaagatcatatagttgtatatatgcaacattatttatgagggctctgttctgctccattggtctatatctctgttttggtaccagtaccatgctgtttcggttactgtagccttgtaatatagtttgaagtcaggtagcgtggtgcctccagctttgttcttttggcttaggattgacttgacaatgcaggctcttttttggttccatatgaactttaaagtagttttttccaattctgtgaagaaactcattggtagcttgatggggatggcattgaatccataaattaccttgggcaatatggtaattttcacaacattgattcttcctacccacgagcatggaatgttcttccatttgtttgtatcctcttttatttcattgagcagtggtttgtagttctgcttgaagaagtccttcacatcccttgtaagttggattcctagatattttaatctctttgaagcaattgtgaatgggagttcactcatgatttggctctctgtttatctgttattggtgtataagaatgcttgtgatttctgcacatcgattttatatcctgagactttgctgaagttgcttatcagcttaaggagattttcggctgagaaaacggggttttctagatatacaatcatgtcatctgccaacagggacaatttgacttcctcttttcctaattgaatgccttttattcccttctcctgcctgatttccctggccaggacttccaacactatgttgaataggagtggtgagagagggcatccctgtcttgtgccagttttcaaagggaatgcttccagtttttgtccattcagtatgatattggctgtgggtttgtcatagatagctcttattattttgagatacgtcccatcaatacctaatttattgagaggttttagcatgaagtcttgctgaattttgtcaaaggccttttctgcatctattgggataatcttgtggtttttggctttgattctgtttatatgctagattacatttattcattttcgtatgttgaaccagccttgtatccccagggataaagcccacttgatcatggtggataagcttgtttatgtgttgctggattcggtttgccagtattttattgaggatttttgtgtcaatgttcatgaaggatattggtctaaaatactctcttttttttttgttttgtctctgccaggctttggtatcaggatgatgctggcttgataaaatgagttagtgaggattccttctttttctattgattggaataatttcaaaaggaatggtaccagctccgccttgtacctctggtagaattcgggtgtgaatccatctggtcctggacttcttttgttggtaagctattaattattgcatcaacttcagagcctgttattggtttattcggagattcaacttcttcctggtttagtattgggagggtgcatgtgtcgaagaatttatccatttcttctagattttctagtttatttacatagaggtgtttatagtattctctgatggtagtttgtatttctgtgggatcagtggtgatatcccctttgtcattttttattgcatctatttgattcttctctcttttcttctttattagtctgctagcagtctaccaattttgttgatcttttcaaaaaaaacagctcctggattcattgattttttgaagggttttttgtggttctatttccttcagttctgctctgatcttagttatttctcaccttctactagcttttgaatgtgtttgctcttgcttctctagttcttttaattgtgatgttagggtgtcaattttagatatttccagctttctcttgtgggcatttagtgctataaatttccctctacacactgctttgaatgagtcccagagattctagtatgttgtgtctttgttctcgttggtttcaaagatcatctttatttctaccttcatttcgttatgtacccagtagtcattcaggagcaggttgttcagtttccatgtagttgagcggttttgagtgagtttcttaatcctgagttctagtttgattgcactgtggtcagagagatagtttgttatgatttctgttcttttacatttgctgaggagtgctttacttccaactatgtggtcaattttggaatatgtgtggtgtggtgctgaaaagaatgtatattctgttgatttgggatggagagttctgtgtatgcccattaggtccgcttggtgcagagctgagttcgattcctggatatcctttttaactttctgtcgtgttgatctctctactgttgacagtggggtgttaaagtctctgattattattgtgtgggagtctaagtctctttgtaggtcactaaggacttgctttatgaatctgggtgctcctgtattggatgcatatatatttacgatagttagttcttcttgttgaattgatccctttaccatcatgtaatggccttctttgtctctcttgatctttgttgttttaaagtctgttttatctgagactaggtttgcaacccctgccattttttgttttccatttgcttggtagaccttcctccatcactttattttgagcctatgtgtgtctctgcacatgagatgggtttcctgaatacagcaccctgatgggtcttgactctttgtccaatttgccagtctgtgccttttaatttgagcatttagcccatttacatttaaggttagtattgctaagtgtgaatttgatcctgtcattatgatgttagctggttattttgctcgttagttaatgcagtttcttcctagcctcgatggtctttacaatttggcatgtttttgcagtggctagtaccggttgttcctttacacgtttagtgcttccttcaggagctcttttagggcaggtctggtgatgacaaaatctctcagcatttgcttatctgtaaaggattttatttctccttcacttatgaagcttagtttggctggatatgaaattctgggttgaaaattcttttctttaagaatgttgaatattggcccccactctcttctggcttgtagagtttccgccgagagatcagctgttagtctgaagggcttccctttgtgggtaacccgacctttctctctggctgcccttaacatcttttccttcatttcaactttggtgaagctgccaatgatgtgtcttgcagttgctcttttcgaggagtgtctttgtgacattctctgtattttctgaatttgaatgttggcctgccttgccaggttggagaagttctcctggataatatcctgctgattgttttccaacttggttccattctccctgtcactttcacgtacaccaatgagacatagatttggtcttttcacatagtcccatatttcttggaggctttcttcatttctattattttttctctaaacttctcttcatgcttcatttcattcatttcatcttccatcgctgataccctttcttccagttgatcgcatcagttactgaggcttgtgcatttttcacgtagttcttttgtcatggttttcagctccatgagatcctttaaggacttctctgcattggttattctagttatccattcgtgtattttttttttcaaagtttttaacttgtttgccattggtttgaacttcctcctttagctcggagtagtttgatcttctgaagccttcatctctcaactcgtcaaagtcattctccatccagctttgttccattgctggtgaggaggtgcgttcctttggaggaggagaggtgctatgatttttagagtttccagtttttctgctctgttttttccccatctttgtggttttatctacctttggtctttgatgatggtgacgtacagatgggtttttggtgtggatgtcctttctgtttgttagttttccttctaaaagacagggccctcagctgaaggtctgctggagtttactggaggtccactccagaccctgttttcctggttatcagcagtggaagctgcagaacagtggatattggtgaactgcaaatgctgctgtctgatggttcctctggaaattttgtctcagaggagtacctggccgtgtgagttgtcagtccacccctactggggggtgcatcccagttaggctacttgggggtctgggacccacttgagggggcagtctgcccattctcagatctcaacctgtgtgctgggagaaccactactctcttcaaagctgtgggacaaggacaattatgtctgcagaagtttttgctgtcttttatttgtctgtgccctgcccccagaggtggagcctacagaggcaggcagacctccttgagctgtggtgggctccacctagtttgagcttcccagccactttgtttacctactcaagcctgagcaatagtgggcatccctcccccagcctcactgccaccttgcagttcgatctcagacttctgtgctagcaatgattgaggctccgtgggcataggaccctccgagccatgtgcaggatataatctcctggtgtgctgtttggaagctggttgtaaaagtgcagtattaaggtgggattgacccgattttccagttgccatctgtcacccctttctttgaggaggaaagggaattccctgaccccttgtgcttcccaggtgaggtgatgcttcacccttctttggctcatgcatggtgcactgtacccactatcctgcacccactgatcagcactccccagtgagatgagcctggtaccttagttggaaatgcagaaatcacccattttctgtgtcactcaagctgggagctgtagaccagagctgttcctatttgtccatcttggctccaccaaccaagactaaatattttttacaaacatattcaaatggccaacaggtgtgtagaaagacgctaaacattaccattcatgagaaaattgcaaatcaaaagatacaactttacagcagttggaatggctaatatcaaaaaaaaaagaaatatgacaagtgttaacaaggatgtgagaaaatatttctgtacagtctgaatgagttgcaaactggaagagtcattatgaaaattagtttgcaggttattttaaaaaatagaactattgtaaaatcccgaaattccacttctgtctataaacaaattaaaatcagcatctcaaaaataatcttcacccctgtattcaatgcagcgttattcacaactgtcaaaggtattttttttaaaaaaacgacttatctgtagatgctgaatggataaggaaaatgtggtataaatagacaaccgaatattattcactcataaaaaagaatgaaattctgctatttcaacaacatgaatggacttgggtacattatgctatgcaaaataagccaggcacagaaagacaaacactgtatgttctcacttatgtggacaatttaaaaagcctgaactcatagaagcagagagtacaatggtaatgaccaggcctggaggtagaaaaaatgataaggtgttcaaagagttcaaacttccagttataagataaataagttttgggggtctaatgtatagctttaagatgtagttaataacagtgttttctatgcttaaaatttgctgcaacagtaggatacctcaaatgctcttactacaaaaaacataaccatgtgaggtgacataaatgttcatcaacttaattgtattaaacattttacaatatatatacctatcaaatttttataatgtacacaatacataattatgcactttttattggtcaaaaattaatgttatgtacacatgcatatattcacagaagtgtgtctatacacatatataaagcatatacatatatatcaattacatatgttgttatgtatatacttgtgtgtgtgtatatatatatatatgtacacatacatatcaatgaaaaaatcctagtaaacttcaaactaaacaagagaaaattataaaatgataactatttaaaaaacaggaaacaaatgggtatttaatacatgctcagcaatattctgagttcctcaatggcaaagtacatgttttaaatgtagaaagtagatacattaaaccatattacagtttaggaattatggcacagcgtgtttacaatattagcctcaatacataccaaaaacttaaaattttgaagtaaaataacattaggttttactacatggggcagaagcttagtgttctgataaaattattgagtatgaatttctgtagaatcacatttgaaaccttcacaggatatgaaattataaagcagaaaacatacaacatctggatttggcctttctgggatttctaaaccaaatcccaatatctccactactctcacacattttagacaagactcaaaatggaaattagaaaatgtttaacatagagttccttaaaaatcacagacggccccatgtcctcaaaaggaataaaagagcaagcagccaggtcctccagtcccttgtaagccatgcaaagggctttgattttctttgtaacctggaagaacgatcgttgaaggggaagtccagtcctagaaaattgaagagcatggggcagaggatgtcagtctctaataaaagcaagagaaagaaatcagggctttgcagaaaaggtttccattggagcatagcttcacaaaccacactttaacatctggctttctccttgacttttggacatctcgtctgtgtcatctgccttattcactcccacctatttggatgtttggctactatctcctgtctcctcacactctggggttttttctttttctcaatgtaggtgatcaggattagcttagagaacagccaaggactctgtattagaaaaagtaatatgacttattctgtgattttccaattactacttagtactgtgctcggtggaaaaaaacagaacattataaaagagtctaaaaatgtaatatcaaatactatttcctcacagaaacgttatgatatttaaaaacttttctaaatttgtgggtccttagctccatcacccagtgctgctgaatcaaaacttggtggtggttggctgggcatagtgactcacaccactgatcccagcactttgagaggccaaggcaggcaaatcacttaagcccaggagtttgaggtcagcctgggcaacatggcgagacctattctacgggttgagggtggggaggagggggaaaggtggtggtaatgggaggtggtaatgcgattataaggtatgggcaaccatattttgtgcctctaaatttgtggagttaccactaatctaaaatgaaggatacagatcagctgaggaaagaaaaagatttatgtcgagatgaaacctcctcgtgggggtccacagctgcaataccgccaggcggcagcatcccacctctttcgactggctgcagccccaccagaagcccggctccagccggggcgctgcggcgcgtactagacccggaaggcgcaggcgcgggtttcctgccctccagggtgtcttcccactacccggaccccaggcaattcaattcattcatcaagtgcctccgcaaccatccaagttggggcagcaggtcccacagtcgccagccaagacctccgctccagaaaccatggaatgctttccccgggggaaggatattgtcttcgccagccacgaagaaatccgtccctgcgcaccttgtttcccattgccaccgacttcgtgtaaagtgtagtcccgaggacacgaaagatacacagacctggccccgtggacacgctctgtgccaaggcttccaccagacggacgggtgcactctacaaatctcggggccacagcaccaacgagacagaaagaagcaaacaaaggaaggaccctatgaaacgcacccccaaagcaatcaaccaatccaagaaaaaaaaaaaaaaacacgtctcagggctccgctggttttcccgcattcgcggccctgaccccctgtcctagcctggcccaagcaccctccacctcaccccggcctgctcaaagtgccctgtctacctgagcagagcctccctctccaaggctctgtctttctctctctgcaactccctcaccctctccctttctctacttccccctccacctctcactcttctatcaccttctgtctctctccccctccaactttctctctctccccccatatctatctctccatcccggtctccctggctttctttcaagctgtgtctgtgtctttgtctgtatgtccttgtgtgtgtgtccgtgtgcgtgtgtccatgtgtccgtgtgtgtgtctgtgtgttgtgtgtgtccgtgtgtgcctgtgcgcgtgcacccgtgtgtatctgtgtgtgtgtcggtgtgggtttgctcgtggtggtggtgtggtgtgtctgggtgtctgtcagcccctctttcccagtatcaggctgccgggactctagtgtcagcgcggggcaaagcagggccttcctgtcctgttggccatgggcgggtcctcgttggaacaagcaacgatggtgtgggcattatgagaaaaagggcccgcggggctgggctggctgttcgcccctgggcagccctggcggcgactctgggtgtgtggggcaagagagggccttgcaagaggggcggcgtgggatccaaatcaatttttccgcggcaaggcggaggaccagagatgatcccaggactgtgggccatgggccctgacgcctccgagcacaccctgtcctgagccggcccgatgtgttggaagctcgggagctcgcgagctgggggaaggcctggaatgtcagtgaaagggaggccgcctgatgggccttgagcctggacaggggactgaggaatcaaggcctgacgacggattcctgtttcctgcaacatggggagtctccaaaatggcctgtttggaaacgaaaggagagcgaagacaagatgctgcttttccacgcttcgctggaggtttctgtgttcccacagagctcgggaaacaaacagtcaacatggtcacgctttcgggggccagagacacatgagcaacaggccccccaccccttgcagaaggcaaaggaacgtggaatccggaatcatgattcactcagcttgagtgtgactcctgtgtggatgggagtatctgcctcgcgctctgttgtaggcttagctggggaggctcacatgtcatctgtgaaccatgtggatgaaaaacggacaacaattcgagtctcggctctgctctttggggaattcgcccattccttgggaagcggaattcgtctgaatcgctcccgggtgaagtaacccaggcgatcccgagggccggtgagcccaccgccggccgatgcggccgtgggccgagcactcagcctgcactgggcacccaacattttcccggagttcgaggtcctgctggtcctggtggcagaagaccgcttttctctttgccttcctttctctgtttcttgctccttttctccctctgtccatccttccctctgttcttccttctctccctctctccctccctccctctctccctccttccctctgttctctccttccctctctccctccatccatacctccctttctccctccttccctccctcccttcctctcttattcttttcctctctccctccctccatcccttccaaggtccctcctttcatccgtcctttcctccctctgtccctccctctcactttgtctccgttcctttccccatttctgcctggcttccctcccacctagaaagggcagaaccacggtttgcgcaagatctcggggtctacatttagttgccgggagctccacgtgatgcggcggggcacgggtgggcgagggagggtggagcggggaggtagtggagttgagctgtggaaaggagagcaggcctggccgctgcccgggccggtgtttcccggggtggaggtctccgcctacaccattgaagaacgcggaggctggggggaggtgtacggcgtggggaggcgggggaagggatgagagccctgtccgggctggtcccaaaccctagccggctgcccatgaacccgcgcatgccagcctgggctggctctgaaatccttgggatgctcaggaaaagaatgacagccctcctttctgtggagtttctcgccggacctggactcagggatcctagacaggtcagctggaagggaagacgcaggtctccatacagagcctgaggttcagcgcgaaagaggggccaccccctgcccccacccggtcccaaccccgcgtcctaaagctcctccagcagagccccgtgttcttcctggctgaggagtggttccagaaaagtgggctcttccatgtccttcaactcccccagtggctccgttgcttggaaaggttgtgccttttgctgaaattctggggtcgacaggagctcatataacagggtggatgcgagtgcagatgaacgctccagctcttggagcggttgggagggtgcctggatggcttacatctgcttctgacacgcagaggcctccgtgggcgcgagctgcggaggtagatgtgcctcggcttcgcgttcccatgctccctggcgacctggggaccctggccccagccccaatacggactcatgtgggacgtgtgcggcgcaagcacaccttgcccctgtgactcagcctgagcggctcaagttgtcccactgagcacgcacacagaaggccgccgtgctgcgagtcctggtccacctgccaactgtttgactcagcctgagcggcccaagctgtcccattgagcacagcacccacaaagcctccgtactgcgggtcctggttcccctgccatctgttcgggtgtggaggtcacccaggtgtctgagggtgggacagcgccacttccgaaggagccagagcagcaaactcaaaatccccgagtgccacggcaggtcgggagattctttctgcctgcaaagcctggctgggctgcagcagaggggccacccctgctgtctggctcacgaaagccccctgttccccacgccctggagtgggtgaaggcgaccaaggagggagggtggcacccgcggtgggccgcgttgcacaggcgcctgcgtgcgcggattccctgccaccctggcctggatgcctggaccttcgattctgatacgaaatctgaatcctgggctccaaaaggcaggtctctctggacagtttgggtacgggttccgctcaaagcacgctagcagggaatcttttttgttcaggttacaaaccagtctccttcgccgtcctcgtcctcgggcttccgcggggaaggggctgtcagaaggtgtcgggagagccatcgcgagggcacctcgccggaatttcacggacagacacgggcagagagaggccggcggctcctgtgcgcctcagttggcctctgtgctgtacgcaggtccagtcaggagtccgaccccgccagtggcccttataaagacccaccagcttcaccccttcatgaatatgcgtgagcacccaagggccctgggtatcccgccctccgaagccagaaatcacagacacagggccctgtgtggtaggtgaaggtggggccagatcggccaggaaaggggggcttctggggctggctctctgagttctccagaattctacggaaactggaagtttctctctgggctcacatacgatttcagggagaaaccaccctggaagggtggtgtgtggaactgaacctccatgacagtcttgagttttccaggccctctccgtgaaggcggcaatgcctgtgggtgtcgccgttgccgtgatagtctcacacacgcaggtgtgtggatctcattcattttcttttttttatttttattttttatttctacctcttaaagtcaatgataatgtcacaagtgtaaaatgaatacatttaaaaacataaaagatacatttcaatgacaagaaatatgcaatgatcatgaaaatctactgtacactttgccaaggtcaaagaatgaaagacaatatggaaaacccaatcttcaaatatatccttaataaaaactctctcctacatagtaaaagcatcatctaaacagcagctccaactgagaaaaaaaaaaaaaaaaaaaaaaaaaaaaaaaaaaaaaaaagcagggtagatgggacagataactttccccaggttttccagacaaaaacatgtggtcaccaggaattcaaggtaacttcaaaagccacatgtaattcaaaataaaatgaacatttctgacagatgacagcagtatgatactgatttttttctttcctagatacaaatgatatggggcatttcttaacagtttagtaatcatctaagaattactgtagaaataaccccaattccaccatcccagccactggtataaaacaaataaccttccattgatactgtctttcacataactaaaatatcctcacttacttggaacaatttcatgcttacacatgatcacaaacacttgtttttagatgttgtggaattattggagctgagatttttgaaacaatatctgaatcttagcagagagctaataatcctttcactatacattgattgggcttccttaaccaaatctgagcaactactgtaataataatgctggtggtaatccatgatactctcaaatttttccctttaagaaatatataatccatgtaattctagcaaatatgttacattgcacagttgcttaacaaggattggctgttttcaggccttattaggaaaacaaagaaacaaacaatgacagttactatctgttttttatcactgataagctgcaataaaactcaaatatgagagtttaattgtgtgatattaagtaaaaaatgaaaaccattatagttttaccaaaagaaatgtaaaaaatatgggaagaattcaaatgagcatggcataagtcccaaagattacactatgattctgaacaggattttccaaacaaagggtatctacttacaatttctgtgaatatttctcgcactagaaagatccaaagcaaacgtaggctcagccctaccttgtcaaagataaatattcagataaactagaagttccatctgctaaagtgcatcggctgaccaggtctaccatggccctgctacttacagccatctaagaaattggcctcacccatgctcattcactcgttctgtggcctatcaagagtcacacataacaatggttttgcttttttaaaaaaaacaaatactttatacagtgaactacagaaaaaattctaaatatacttttaacattctagagagttaaggtaacctcatttttaaaaatactgaaaatgtaaagggtccatataaagagttgtgttaagtacatacttcctattttaataattcacttgctgtgttcttaaaatctctctgagagaagcagatattttactcatgtattttggcaagagattcaaaagcaaaagtagcagggctgtaaaatttcataaagtttgtgggatttttaaaagctaaattattcaatattttgtattgttattgcaatcatatattgcccggaatatatatacagcaacccagcaacaatgattgcaacgaaagtaaggtaaacaggtctacaaacatttgatttccttattagatagatgaagttttcatagaggaagtgcaaattcagatcaggttacataagcttaacaattatttaaactgtatataaaattaaatctaaccctcaccactacaaatctgtaaggaatcactgtcaggaatctacaggacttggctcttatttacattcgacgcacacttagaaagttcacaaatgatgagatgcaggccaaggggattcctcaaagggctccacccaaaaggaaaagaaagagagctaaacagagaattaccacttatgtatttgtgggtaatcagcttattcctcagcctctagacagtgaggaggatgaagaaatggaagaagataacaaagaagaggaagaaaaagatcacagtgaagcgatgaagccagaggagccacctcaaaatttactgagagaaaaaatcatgaaactgcccctccctgaatctttaaaagcttacttgacatattttagagacaaataacttagatcaagaagaaagaatgcctactgataattcctttagtcttgaaaatgtagcatttgttaggaattaaaagaattatttatttcatcagagcaaattataggggaaaaaatatcacttgttactgtcagtaacataaatgatgtattgagtgaataaaagaatcccttttataaaatctatttttctttaaatcttggaaaattgttgtttcacctcagagtgatttgaaagtggaatgtaacagtagtcaagacttgtgtgctatttctgattcttccttttctgattccttacggatctcgttcattttgatgtagaaaacgagagcaaaactacagagaaaagaaacgccaggtgcatcacagcctgaggatggattcctgtttcctgcgacatggggagtctccactatggcctgtttccaaacaggaaactggaaaggagagcgaagacacgatgctgcttttccacgcttctctggaggtttctgtgtccccacagagctcgggaaacaatcaacatggtcacgctttcgcgggccagagacgcatgagcaacaggcccccttgcagaaggcaaaggaacgtggaacccgaaaccacgcttcagtcggcctgagtgtgactcctgtgtggacgggactatccacctcgcgctccgttgcaggctcaacctggggctatctcatctgtgaaccatgtggatgaaaattggacaatcgcctgagtctcggctcattgctctctggacaattcgctcattccttgggagacgaaattcgtctgaattgctcccggattaagtaacccaggctggcgatccggagggcaggtgagagcgccgcaggccgacgcggctgtgggccgagcacttagcctgcactgggcacccaacattttcccggagtgcaagatcctgctagtcctggaggcagaagactacttttctctctgccttcctctctctgtttcttgctccctctttccctccttccctccctcagttcctcccttcctccctccctccctccttccctctccctctccttctatccctccatcctttccaaggtcccacggtccatccgttctttcctccctccatggctccctccttctctgtctccgttcctctccccatctctgcctgagttccctcccgcgtagaaagggcagaaccctggcttgcacggggtctcgggtctgcatttagctgtcaggtgctccacatcgatgccgaggaagctggcggggcaagggtaggcgagtgacggtggggcggggaggcagaggtggcgagacgcggaaagaagagcaggcctggcgtctgaccgggccagtgtttcccgcccgccccactgaagaacgcggcagggggcaagagagaagggatgagagctccgcctagactagttagaaaacctaggctactgcctgctaacccgcccatgagcagtagacagtccgcctcccggtacctggacgggccctgggatccccggaatgctcaggaaagaatgatagccctcctctgagtggagtctctcacgggacctggaactcagggatcctaggcaggtcagctggaagggaagacaagcctctccataccgagtcagaggttcaccgcgaaagagaggccgccgccctgcccccaccctgccccaaacccgcgtcctaaagctcctccagcagagcccggtgttcttcctggctgaggagtgtttccagcggagcgggctcttccacgtccttcagcttccccagtggcgccggatctaggaaagactgtgccttttgctgaaactctggggttgacaggagctcatctaacaggctgggggtgtgtgtagacgagcgccccggctcctggagtggttgggaggtgcctggatggcttgcatatgtgcttgacgaggaggcctccggggtcgcgagcttcagagggggaggtgctcggtcttcggtttcccacgctgccctggcaacctggggctcaagccccaccgcggactctggtgggacgtgggtggcgcaaacacaccttgcccctgtgactcagcttgagggggcccaagcggtcccactgagcacgcgcccaccaggccgccgtgctgcgggtcctcttcctcctggcatttgttagggtgcggaggccactgaggagtctgaggatgggacactcctacttccagaggagccagggcagcgaacacaaaatccccgcatgcagggacaggttgagagattccttctgcctgcgcagcctggctgggctggagcggggggaaggcccttgctccctggctcatgaaagccccatgtgggagagccccaggcgtgcagggcgtgtggggtgcgggaagccccattccccatgccctggtgtgggtgaactcgattgaggagggaggaagatgacacccaccgggggtgttaattagtaaccacagtggcctcaaagagctcaaatgaaaggaagaattgcatgtctctcactttaagtccagagctagaaatgattaagcttactgaagatgtaaaattttcatcgctagagagacgtcaacacttggcttcaaaacttcaaaggatgggctgactctctttgaggaccactgcagttggtgactttaagttacagccaatgatcattgaccactctgtaaatctcagggcccttaagagtcatgcaaaatctattctttctgtgctctagaaacggaacatcacaatctgagtgacaacacatctgttaagagcatggtttactgaatattttaatcccactattgagacctactgctcagaaaaaaacaaaaaacaaaaaaagaaaaaacaaaaacgattcctttaaagggattgctgcttggccaggcacagtggctcacacctgtaatccctgcactttgggaggcgaggtgggtggatcgcctgaggtcaggagttggagaccagcctggcaaaaatgatgaaaccttgtctcctataaaaatacaaaaaaattagccggacatggtggttgtacctgtaatttcagctacttgggaggctgacgcagaagaatggcttgaatcctggaggtggaggtagaaatgagccgaggccatgccactgccctccagcctgggcaacaagagggaaactacataaaggaaaaaaaaggaaagaaaagaaaaaaagaaaaaagattgctgcttattgacaattcacctagctacccagaagcttagatggagatgtacttggaaattaatgttattttcatggctgctaatacaatatctatccttcagcctgtggatcaaggagtggttttgacttttcaagtgtttatattaaataataaatgcattttataaaggtatagctgtcatagatagtaatttctttgatgaatctggataaactgaattgaaaaccttttggaaaggtttcaccattaataccttcatgatatttcaacctcttccggtgaatcacaaatgtccttaatagcaaatgccattaaggacatttgtgattgatgggaggaggttgaaatatcaacattaacaggagtttggaagaagttgattccagccctcatggaagactttgagggctcaggatgtcagtggaggaagtccctacagatgtggtagaaatcgcaagacaaccagaattagaattagggctttaagacgagaataaattgctgtaaactcatgatgaaacttgaacaagtggggagttgcttcttatggatgagcaaagaaaatattttcttgagatggaatataatccaggtggagatgcaatgaagtttgttgaaataacaacaaaggatttagaatattccataaacctagttgataaagcagcagcagggtttgagagggtttactccaattttgaaggaagttctactgtgggtaaaatgctatcaaacagcatcacattctacagggaaatgttttgtgaaaggaacaaacttcattgttttaagaaattgacacaggcacccaactttcagcagcccccacactgatcagtcagcagccatcaacatagcggcaagaccctcactgtagataaaagaaagagagctcagactgttactgtgtctatatagaaaggaaaaacataagaaactccattttgaaagacttgtactttaaacaattgctttgctgagatgttgttaatttgtagctttgcaccagccactttgccccagccactttgacccaacctggagctcacaaaaacatgtgttgtatgaaatcaaggtttaagcgatctagggctgtgcaggacgtgccttgttaacaaaatgtttacaagcagtatacttggtaaaagtcattgccattctctaatctcaataaacgaggggcataatgcactgcagaaagccgcagggacctctgcccttgaaggcggggtattgtccaaggtttctccccatatgatagtctgaaatatggcctcgtgggatgagaaagacctgactgtcccccagtccgacacccattcagagtctgtgctgaggtggattagtaaaaggggaaagcctcttgctgttgagatagaggaaggccactgtctactgcctgcccctgggaactgaatgtctcagtataaaacctgattgtacatttcttcaattctgagataggaggaaaaccgccctatggtgggaggccagacatgtttgcagtaatgctgctttgttattctttactccactgagatgtttgggtggagagaaacatatctggcttacgtgcacgtccaatcatagtaccttcccctgaacttaattatgacatagattattttgctcacatgttttttgctgaccttctccttattatcaccttgctctcctactacattcctttttgctgaaataatgaaaataataaccaataaaaactaagggaactcagaggccagtgctggtgcaggtccttggcatgctgagcgccggtcccctgggcctactgttgcttctctatactttgtctctgtgtcttccttgttttctctgtctctggtcccacctcactagaaatacccgcaagtgtggaggggcaggccaccccttcactcaccagcaaaaagattatgacttgatgaggctcagatattcattagtatttttcagcaatgaggtattttaagttaaggtatgtacatagatttttagacataatgtgattactaattaattgataattattaaatactcattagactacaacatagtttaagcataacttttataagcactgggaaacaaaatgtgtatgcgactaacttgattgtaacattttccttattgtggttgtctggaaccaaacccacactatctctgagtatgcttgtaggtttttggttgttctttgttttgagatggggtttcgctctgtcacccaggccagagtgcagtggcatgatcatagttcactgcagcctcaaactgctgggtcaagtgattgttctaccacagcctcctgagtagctgggactacaggcatgcagcactatgcctggctattttttttttttttttgagacagagtctcgctctttctcccaggccagagtgcagtggcgctatctcggctcactggaagctccgcctcccgggttcacgccatcctcatgcctcagcctcccgagtagctgggactacaggcgcccacaccaggcccggctaattttttgtatttttagtagagacggggtttcaccgtgttagccaggatggtctcgatctgctgacctcgtgatctgcccgcctcggcctcccaaagagctgggatgacaagcgtgagacaccgcgcccggcctgccttttctttctagtggctcaagccccatggtgtgtggtgggcctgatctccgatgcttttgaacagtgtagaaactgttgctgtctgtatttaattttttcctacatgtatggtctcgatcgatcacaagaagatcaataagcccttctccttattctacttccctttctagcaacggagaactttgattggatttttcctgtctacagacaggaatgagtctgctgttttcttttttaaacccgaggggactgagcctgagggcctcgagcgcggccatcctcctccaacccacaactggtgattgtggtggtggtggtggtggtggtggttttgtgttccagcttctgttctgttgttgttgttgttgctgctgctgctgttgctgctgctgctgctggtgctgtcgtcattgttttggtattttacagactcggggtgtatgtgcttgtttgttagatcagcgtactactgcttccggatgtagaagtggacctccagtgtatccgttacccacatggcgaacgttgtctctgactggcaatttattcattcctcgtccccctcttaccctcctcctcccttttggagtgtctgttatttccatcttgatgaccgtacgtgtacccattatttacctcccacttgtaagcagaaggcagttcactgggtacatacttgcttccagctctacccatgttgtgggaaaagacgtgaaatcactcttttttgtgcctgcaccattggagaattttaacttttttctcttcttttcttttctttcttttcttttcttttctttcttttttttttttcttttctttcctcctcctcctcctccttctttttttcatttttttcagctgggctctcttacttgtgttgctcagttgctcgggctggtctcaaactcctggacttgacacttctcccgtcacatcaaccgcctggttgttgaaatgagcatctcttgtaaaattgaaaagatgaaaaaaatagagagaaagacaagaagcagggggtgaacgtttctcttgccgcctcccagggtgtaccttggacccaataggagggagggagcttggctgggtgggtttttggtgctaaatcctcccgagggcctccttccctctcccccttgtcccctcttctcccccagccaaggctcccaccgccgctgtgggattttccgtgggagagatatgggagaggactgacgcggcttccagatctatatcttgccagacatctctggctcagcgtcccccaccggctgcctgccaccttccaaggagctctgaggccgatgccccgcccccttcacatcccgccaccctcctccggttggcctacgcccggcgaccccaagggagccgcgttgacgctttcttcttctttttcttgttttattttattattattatagtttaagatttagggtacatgtgcacaacgtgcaggtttgttacatatgtatacatgttccatgttggtgtgctgcacccattaactcgtcatttagcattaggtatatctcctaatgctatccctcccccaaccccacaacagtccctggtgtgtgaagttccccttcctgtgtccatgtgttctcattgttcagtttccacctatgagtgagaacatgcagtgtttgttttttttgtccttgagatagtttgctgagaatgattgtttccagtttcatctatgtccctacaaagtacattaactcatcattttttatggctgcatagtattccaaggtgtcgaatccttcagcgaagtcttccaccagatgccccgggtgggccggatggatgggatgagactggaccaccccagaccgtgctgttcttgggggtgggttgacgtacagggtggactggcagccccagcattgtaaagggtgcccaggtatggaaatgttacataggatgccctccttcccgtcagcctgccttcagcttcctcaggcatgaagacaacttcccatcagaaccttttttcttccctttctccaccacacagatgagactcatgagagggagaaacagctcaatagatactgctgaccttcatttgtggaatcctcagtcatctacagacagagaggtgactagacagggacccaaatcaaaccccatttccgggtcctcatggtgggattggtctctctctctctctctcacacacacacacacacacacacacacacacacacaatttccacatctagttcacaaaccacactaatttacccttttcacagtatgcagtctgagtaaaacccaccacaccctccacccggcgactgacgaaaccccttctctacaatttattaaaaagattatctgggccgggcacagtagctcacgcgtgtcattccaacactttgggaggccaaggggggtggatcgcttgaggccaggagttcaagcccaggctggccaacatggcaaaaccctatctctatgaaaaatagaacaattagccaggcctgttggcataggcttgtaatcacaactactcaggaaactgaggcgggcgaattgcttgaagcagggaggctgaggttgcagtgagctgagatcatgccatggcaattattgagacagagcgagactctctcaataatcataatattattataagattagttgtgcgtgctgatacccgactgtagtcgcagctactcgtgaggctgagataaggagaagatcacttgaggccccacaggttgaggcttcagtcagctgttacccactgtatcctgggcagtcaccagtcaaggagatatgcccttccccgttttctttcttttcttttcttttttcttttcttctcttctcttttcttcttttttcttctctcttcttctccctttctttctttctgtctctttctttcttttcttttctttctttctttctttctttctttctttctttctttctttctttctttctttcctgcctcactgccttcctgcctttcttctttcctcccttcctcccttccttctttcctcccgcctcggcctcccaaagtgccgggattactggtgtgaggcaccatgcctgcttggcctaaagggacaccctttgaaagtaagacacagacagcgccttccagtgatctgattgattgattgattgacagatttcgagacagcgtctcactctgtcaccctggcagtggtgccatcatatctcacttactgcagcatggacgcttctggactcaagcgatccttccacatcagcctccagagtagagtacctgggaccacaggcacacgccattgtgcccagatcatttttatttatttatttatttttcccgagacagagtttcgctcttgttgcccagactggagtgcaatggtgcgatcttggcccaccacaacctctgcctcccgggttcatgcgattgattctcttgcgtcagcctcctgagtagctgggattgcaggcatgcgccaccacgtctggctgattttgtattgttagtagagacggggcttctccatgttggtcaggctggtctcgaactcccgacctcaggtgatcctccctcctcggcctcccaaagtgctgggatgacaggcgtgagccactgcccctggccttcatttttaaatgtttttccacagacagggtctcatcattttgttgcaaccctcctgacccggcgtctcaaagtgctggcgtgaagggcttgagccactgcgccttgactccgggaaatgattcacgaccacgacggctgtactctttctttctttctttctttctttctttctttctttctttctttctttctttctttctttcttttattctttctttctttattttcttctttcttatttattgatgaattttttatattgattgattgattttgagagggagtcttgctctgttcgaggcgaggcgaggcgaggcgcatcgctttggaggccgcagcactgccttctaaagccccattcaaatgcacaaagtcctattcccttcctggagttggagctgatgccttccattgccttgggcttctctccattcagaagattttacaggtgcaaccccacccagaggctggctgcggctgaggattaggggatgtggtggggctggaaactcgtcctctattgttgcaagctcagccaagacatcccccgacccccatcgcttgctcaccctttgagatcccctgcctccaccgccttggaggctgacctcttactttaatttctgtctttcttcctttcctgcgtttgaggagggggtgcaggaatgagggtgtgtgtggggagggggtgcgtggtggggacggaggggagcgtcctaagggtcgatttagtgtcatgcctctttcaccgccaccaccgaagatgaaagcaacaatcagctaaataccgcgtgttctcatccataagtgggaacttatagatgagagttctgcgtgggcagaacgagggggacgagagacgcgggagtctacttgaggaaggaggggtggaaggagagacagcttcaggagaaaccaaaacaaaacaaaacatgaaaactgtcgagtactgcgctgagtgtccgggtgatgaaatcatctgcacactgaaacccccggcagaagtttacctatgtaacgatcttgcacatgtatgtttgaacaagaagtgaaagttaggggagaaggagagagaaagggagagagagagggaaagagagaaagagagagagagaagtgaaacgaaacaccacctccttgacctgagtcagggtatttctggccttttgggggaacattcagcgacaatgcagtacttgggcccgttcttttctttttcttcttttcttttttttggacagagtatctctcgctctttcacccaggctgcggtgcagtggcgctctctaggctcactgaaacctctgcttctcgggttccagtgattcctcttcggtagctgggattacaggcgcgcacgacgatagccggctaatttttctatttttagtagagacagggtttctccatgttggccacgttggtattgaactcctgacctcaagtgatccaccctcctgggcctcccaaagtgctgggacgacaggcctgagccgccgggatttcagcctttaaaagcgcgggccctgacacttttcgctgcggcccttatgctcagaatgacgtgtcctgtctgccataggttgactctttgagtcccctatgccattgcactttagcctgggcagcaagagcgaaactccgtccccccaccttcccgtgcaaataaatagataaataaataaatgaataaataaataaataaataaataaataaataaaatctctacacatgacctataagtgtgtgttcccatgagttatttctaagaaatggcactgtacattgaacgcagtggctcatgtctgtcatcccagcactttgggaggccgcggtgggtgggtcacgaggtcaggagttcaagaccagcgtagccgacatggtgaaaccgactcagtttcgtattttcaatctctactgaaaatacgaaactgagtcgggcgcggtggcgcaggcacctgtaatcccagctactcgggaggttgaggcggaagaatcgcttgaacctggcaggcagaggtttcagtgacccgggatggtgccactgcactaagcttggtcgacagagtgagacttggtctccaaataaataaatgaaagaaagaaagaaagaaagaaagaaagaaagaaagaaagaaagaaagagaaaagaaaagaagaaaggagaaaagaaaagaaaaaaaagaaaaagaaaagaaagaaaaaagaaaagaaaagaaaagaaaaaaagaaaagaaaaccagaaaagaaagataaaatgaaagaaaaggcactgtatcgctactgggctaggaccttctctctttctgtctgtttctctctgtctctctctgtctgtgtctgtttctctctgtctctctctgttttcctctgtctcgctgtctctatttctttttctgagtctctctgtctgtctctctcgctctctctctctctgtctctctctctgtgcctatcttctgtcttactctctttttctacccgtctgtctctctctctgtccctctccctccctttctgtctctctctctctcactctctctctgtctgtctctctttctgtctgtttctctctgtctctctctctccatgtctgtctgtctctctctttctttctctctgcctctgtctgtctctctctgcctgtctctctcactgtgtctgtcttctgtcttactgtctttctctgcctgtctctctctctctctccctccctgcctttctgtttctctctctctctttctgtctgtttctctctgtctctgtctgtctcttcttctgtctgtctttctctctctttctttctttttttttttcagatggagtctcactgtgtcgcccaggctggagtgcagtggcgccatcttggctcactgcaagctccacctcccaggttcacgccattctcctgcctcagcctcccgagtagctgggactataggcgcccgccaccacgcctggctaatttttcgtatttttagtagagacgggatttcactgtgttagccaggatggtctcgatcttctgacctcatgatccgcccgcctcagcctcccaaagtgctgggatgacaggagtgagccaccacgcccagactgtctctctctttctttctctctctctctttctctctctctctctgtgcctatcttctgtcttactctctttctctgcctgtctgtctctctgtctctctgtctgtctctctccctccctgtctgtttctttcactctgtctctcttgctctcgcgctctctctctctgtctctctctcacgctatttctctctgtcagtctctgtctgtctttttctctgtctctctgtttctttctctctatctgtctctctctccctctgcctgtctctctcactgtgtctgtcttcagtcttaatctctttctctgcctgtctgtctctctctccatctctttctgtttctctctctctctctcactctctccgtctctctctctttctgtttctgtctctctgtctgtctctgtgtgtctgtctgtttctctctgtttgtctctctctctctttctgtttgtttctctctgtctgtctctgtctatctctctctctctctgtctctctccctccctgtctgtctttttctctctctctctgtctctgtctctctttctttctgtctgtttctctctgtctctctctgtccatctccgtctttctatgtctgtctctttctctgtcagtctgtcagaccccccgtgccgcggagggccctgccccttccacgaaagtgagaagcgcctgcttagagaggcccagaggaatctagacagacgagacttaacaggcttcgccactcggtgtatgatttcgggaggtcgaggccgggtccccacttggatggaagggacattttcacacttttctctctgtcatgtgtggcgtccctacttctcatatttccctgattagctcctcgacttaaaaatacacggttaaggccgagcgcagtgactcacgtctgtcatcccagcactttgggaggccgaggcgggtggatcacctgaggttgggagttcgagaccagcgttgccaacacggcgaaacctcatctctactaaaaatactaaattgagtcgagcgtgggggggcaggcgcctgtaatgccagctactcgggaggctgaggcgggagcatcgcttgaacctgggaggcggaggctgcagtgagccgagatcgcgccactgcactacagcccgggctgtagagtgagtgagactctgtctctaaataaataaataaataaataaataaataaataaataaatacattatttttcgtgctgactgacacttgcaggcatcggttgtcttcgggcatcgtagcggccactgttattgaaagtcgaggtgacacggagggaggtctcgccgacctcacagagcctggggcaaccgatttctctctctcccttctggaggtccctccctctctccctcgttgcctagggaacctccgctggcgggggccctattgttctttgatcagcgctttagttttctttgtgcgttgttttctttcatgagcatagactcttctacttgggttttaggaagggtcagtttaattttcaagtcgccccccagctcccctcactacccacgtccctttaccttcgtttagtgagtcagttaggtgggttccctccaaaccccccaccctccgcctcccaacaccctgcttggaaaccttccggagccacccaggtgtgcctccgtcttctctccccttcccccaccccttgccggcgatcttattcttaccaggctgacatttgcaacggtgggcgtcaggcctcactcagtggccacggttttttaagatggggtggcacggtcccacttccccagaggcagcttgggccgatggcatagcccttgacccgcgtgggcaagcgggcgggtctgcagttgtggtttttttcccccgcttccctcctcaggcctccctccctaggaaagcttcaccctggctgggtctcaatcaccttttatcatgatgttttcgtttctccgccctccggccagcatagtttcacaatgggaatgaagtcacagctctagtctgggccttcttagcattttcccaaaatagaaacgctttctgaaaactaatactttgctcacttaagatttccagggacagtgccttggcccgtgtttgttggcttgttttgtttcgttcgtgtttttcctttttcttatatatttctttttagatgaagtagaaatccccagttttcaggaagaagtatattttccccaagacatattagctgcagttttctcctgtagttaactaacgattttgtgaatctctgaacgtatagtgagagccggttgatgtttactagacttcagaacatctcatgttctagaaatccgtaagcaaatgctgctgctgctcttgctgctgctgctgcttttgttgctgttgttgttgttttcaaagcacaccccggccaccgtttatgggatcaaaagcgttataaaatatgtgtaattatttcctgagcgtgcccttcctcctcctctctctgtctctctgtctctctttctctgtcttctctctctctctgtctctctctctgcctgtctatttctctctctgtctctctcactgtgtctgtcttctgtcttactccctttctctgcctgtctgtctctctctctctgcctgtctgtctctctctctctctctctccctgtctgtctgtctctttctctctgtcactgtctctgtctctctctgtctgtctctgtctttctctgtctgtctctctgtttctctctttctctctgtctctgtgtgtctctctctctgcctgtctctctcactgtgtctgtcttctgtcttactctctttctccgccagcctgtctctctctctttgtttctctctgtctctctctgtccatctgtctttctctgtctgtctctttgtctgtctgtctgtctgtatctctctttctctgtctcgctgtctctgtctctctctctgcctgtctgtctgtctgtaggtctctctctctctccctgtctgttttttctctctctctctttgcctgtctgtttctctgtctctgtctctctgtctgtctctctctgcctgtctctctctgtgtcttctgtcttactgtctttctctgcctgtctgtctgtctctctctctccttgtctgtttctctctctctctgtctctgtttctctctctccctctgtctgtctctttctctgtctctttctctctgtctgtctctctctttctctctgtctgtccattgtctctgtctctgtgtgtgtgtgtgtgtctgccttctgtcttactctctttctctgactgtctgcctgtctgtctgtctctctctgtctctctctttctgtctctgtctctctttctgtttctctctgtctctgtccatctctgtctttctctgtctgtgtctttatctgtctgtctctctctctctttctgtctttctctctttgtgtatctttgtatctctctgtctgtctctctctgtctctgtctttgtctctctctctctctgtgtctctcgcccgctctctggctctcgctatctcccaccctctctttctttgcaaaataagttcaagtacttctaatctaatccattaccacagcctgaattcttaactttagacatcccagatttgatctccctacagaatgctgtacagagctggcgagtttatttctggacttggatacctcatagatattacatattaataaagatccaaccctaaaatctggggttgtgtttccctcgactgtctcaaaaaatcatacctctgttcacctaggatgctgggaaggttttctcaatgtgcatctgctcgtgtcctacatgaactgtgaccgagccctgtccgttctgtctcaaatatgtatctgcaaacacgtctctccatttccacaactacccatggcccattgtggaaccattggctctttgaaaaaaaatcccagaagtggctttgactttttggctaggaggtctaaacctgctgagaactttcctgcccaggattctgtgtgaacaaaagtgcctctgctgggagctgggatcttcgggaccatgcttgctaccgctggatgagtctctggaaggacgcacgggactccacaaagctgacctgtcccaccgaggtcaaatggatacctctgcattggcctgagtcttccagcttacatcaccatcaccaaagctcgccatcagcatccttgtgagcctgcccaaggcctcgactctggggagactcttgggagcccggtcttcatcggctaaagtacaaagggatggcgacttccacccacaaggtccccactgaactgcgaagatgtggaacgtaggtcagagaggggacctggaggggagacatcctgacaggcaatgagttaactaggctctggccaccccactcacgtcccacgtcccgggcaaccgcgggacactgccgctttatccccttctctgtccacagccgcccccaccccaccccgcaacccacgcacacacgctggaggttacaaaaccacacggcgtgaatacagcctgacggagcgagagctcatttcacgaggcgggggtggtggggtggggtgggggttggggtgtctgtagagagcccgattctacgattctacctcgtgggtggctacaggatacaaatgaatattgcttcttgggcggaggggcttccttaggctgtcatgtttgcgagactatctctcaaaacctcccttgaggccacaaaacagattccaccccacccctccacgtttccccggggtgctggatgtatcctgtcaagagacctgagcctgacacgttgagtgaaacacatttattggcttcgtgtgtttgtttgtttctgagatggagtcttgctctgtcccccgccccggctggagtgcagtggcgtgatctcagctcactgcaacctctgcctcctgagttcgagcgattctcctgcctcagcgccaccaagcctggctcatttttttatttttagtagacacggggtttgaccctgtttcattggttttcactggagattctagattcaagtcacacctcattgtgtgccacataatgacttctgttatttatttattttttttttaaagcacaatatatctgctttatttgagtggctttatatatcgttataattgtgttatagatgaagaaaagatattaaacacagtgctaatgatagtgaaagtgaaaaacaaaagaaaggctatctattttgtagttagaataaatttgctcagtatttagagttacctaaatacgtcagcatttaaactcctcctagtaaaagctggccaatctgaataatcctcctttaaacacaatttttgatatggttaaagtttttaagaatgtgactcctgcagaatagctgaacagacaatacacatttaaaaaagaacaacacaagggtcaatcagacttgggaaaaaatcaaaaacaacacaagtcttatgaagaactgagttcttaaaatattacggagaacatagctatcggaagagaaggcagtattggtaagttgattgttacatttgtcagcaaaagctagcactatttttttggcaatctttcaggcactgcaactactactgcaaaatgagatataatcatttaaacaacatattcacaaatcaaaaaatgttttcgtaatgtaatgcttcagatttagaagcaaatcaagtgttaaaactcaactgctataataattaaccccaaagataaccgtatctgacaaaaaagcttccacagagttatgacgtcagaattatactttctcttgatatttatttatgtatttatttatttatttatttatttatttaattttatttttttcttgagatggcttcttgctctgtcacccaggctggtgtgcaatggcataatcttggctcactgcaacctccacttcccgggttcaagcgattttcttgcctcagcctcctgagtatctgggactactggcgcccgccaccattcccagctaattttgatacttttaatagagacggggtttcaccatgttggccagcaaggtatcgatctcttgaccttgtgatccgcccacctcggcctcccaaagtgctgggatgacaggcatgagccaccgtgcctggccttttcttgatatttaaacttttaagtcagtccagaaaaatacaataaatgtcaacagtaagtatggtgttgaggtagaagtaggatcaaactttttcatatgttattcggttgataacaatatgacctgggtcataatttcctatgtgtctacttatatacaagtacaaaaaagtaaaacagagatactgctaaataaaagggtacactaagttcttaatagtaactcaataaactagaacactgtcaaaaagcagcaactagtgaattttttcagtgtttttttctgttatccaataagtgaattatgctattcctttccaatttcccaagcactttttgtctcaatcaccatttctgtgttcgaagaaaaagtaacaaatcaagtaacaaaactaaacaagcaaacaaacaaacaaaacacaactagagcatctgcaaaagtttggtagaagactgaaactcttgagtatgaggatctggtattctattatcattagttaacttaagagtttgttaaagacatacatttcataagaaagcgtgttagtttgaagttattgaccagtatgtaccatccctaagtattagtagccaaattcatgacaataaagagctatctaacaagaaaaattagtgactaccagcaccatcaacaagactttgtctttacacttcattaccacttaccgtgcattataatatctaggattgactctgataacatttcaaaaactagctaatgctttgtccaattcttcagttaagacaaactcatgccctaatagagtatagacataagcataatttggatccacttggatagctctctgaaagaatttaattgcaatatcgtgttcccgttgcagagtgaaacagtcccctgcagcacaccagacctctggcgaaattttatccatgtctgttaagtcttttgacagaaatgaaagagcaacatctttttgaagatgccaaagtgttgtagagtagatttccatgccttccactctatgattctcaatccttctaacctctgagaatagtctttcagcttgcatgtactctgaaagttcaaaataggcccttccaatttggcacagtacccaaccagtattgtagtggtgagaaggtaaatggctcaaaatatttatagcttctttgcagtggtatgaacacaaagctaaataacctttccccctttcacgaagaaggctcatcaagccttctgctgctgctttttgtagattaaaagcctgaatctgaggtgtgattgtggatattttcccttctgaaatgatggaagagtacaattttgttatttccaggctgtcatttatattaggtttagttattcctcctttattagttttactttttgtttttctgtttgggattttaggtggaaactgtatttttaatttcttcctattctccttggttgtggaactgtcactagtcaagagtcgtgaacttcttcgatgcagtgcatttgagggagatgtcatagtggggctcaatacctgaggtgttgtacttatttatggaccagaactttctgtttgtgcaagaattggagttacctcttggctatttccactctgtgagaagacagactttgctccaatttggactattctggcaacagacttttttggagggactccagtggatgtcacatccattacagaagctgtattagtgtagttttgtaaataggatccaactccaggacttggggtttctaatggcaaaatcccaaaacttggggttaatggactaagagatgctggtcctcctaataaacttcgatcagtttttggtttattttgaacctgtttagataatatggaagttcctgttcccagtgggacagtatcagatgaaattacagctgaatcaatagaagacactggggaatctgtattcaaggagtactttgaattggcagattctaaattcaatctgtttaattcagttgtgttctggggtgtttctgtaagaatggtctcaggctgtctgtgacataaactatgattaggtacttgtgctttgcaagagttgggcagacagtttctaaagttctgtgaagatgcgaatttaaatgtttggtcaggatctggcttttcacctatttcacataatgattcaaagggataccagaggaaaggatttaaactaaggctcttttggtagcattctgatcctttggcaagccgatctgtcttgcaatatacatgtcccaacaatggaaggggaaagcaagctgaatcaccaaactcagtaacaatatcatcatggcttttctgcttatgaaacactccaccagataagatttgttccccttctgcaagcttgctgacatcaaaacaacattttgcaagcaggtatttgcattgtggtgtaggacaactgtgtcctttcaagagtctatatgctttataggtctttcctgggcggtaagaacaggtcgccagtaaaaacaaggcttcttctgagtgtacttctgcataaaggcgttctgcgaggaaaaccccatctcggtaagcatagtggtttagtgcttgccatgtagcagcctggacgggttcctgtagcaccatcatcctcgaggctcaggcccactttctgcagtgccgcgggcagccccccaccccgcccacacccctccccccggtagcggctccggcaaagccagcctcagctcatttaaactcaccagttaccaggggatgggggaggccgagccagaatgacttctttaccctgccaactgtggaaagcccggccccctgtgatccatcgcaaagcgagagtcacctcatgtttggaaaacggatccgctcccaagttcagtggagggatgtggcatataggatgaaggactctcttcttctgattgggtctgcacagtggggcctagggctggagctctctctgtgcggaccgctgactccctctaccttgggttccttcggccccaccctgggacacgggccttggcagattctgacccttcctggcacttaagtcgctgtcagaaaccccatctcgtcctcggatgccccgaatgactgtggctcggacctctctggaaacattggaaatctctcctctacgcgcggccaactgaaaccacaggagctcgggacacaagccgccatccacctcactgctttcgggagagaatgctgagtctcttaccgactctctcttgacttgagttcttcatgggtgtgtcgttaagacgtagtgagaccagatatattaactcaggcctggtgctggtggctcacgcctgtaaccccaacactttgggaggctgaggctgtaggatcccttgaggaatcgccgaaccctgtggaggttgaggctgcagtgagtgagccataatggtgtcactgcactccagtctgggggaaagacagagtgaggccctgtcacaggcaggcaggcagacagacaacagctgtattatgttcttctcagggtaggaagcaaaaataacagaatactgcgcttaattttttttttttttggtgggggacggaatttcactcttgttgcccaagctggagtgcaatggcaccatctcggctcactgcaacctccacctcccgtgctgaagagattctcctgcctcagcctcctaagtagctgggattacaggcatgggccaccacacccggctgattttgtattgttagtagagacggcatttctccatgtgggtcaggagggtctcgaactggccacctcaggtgatctgcccacctcggcctcccaaagtgctgggatgacaggcgtgagccattgcgcccggccagttacgtttttttttttttttaaattttcaattttgatctctttattattattattatttttttgagacagagtctcgctctgttgcccagactggagtgctgtggcgtgatgtcggctcactgcaagctctgcctcccgggttcacgccattctcctgtctcagcctcccaagtagctgggactacaggcgcccgccaccgcgcctggctaatcttttgtattttgagtagagacggggtttcactgtggtagccaggatggtctcgatctcctgacccccgtgatccgcccacctcggatcccgcccaaagtgctgggatgacaggcgtgagccaccacgcccggcctatttatctatttattaactttgagtccaggttgtgaaaccagttagtttttgtatttttttagagacgaggtttcaccatgttgccaaggcttggatccagggatccaccttccctcgcttcccaaagtgcggggatgacaggcgtgagcctaccgcacccggctccacccgttcccccaacagcttatcactcaggtgcccgaagtccagctgtggtgtgtggttcccacccccagcgccccctcctctggtcgccgccgtgttgtctgggagtgggtcctgagggagctcgttggtgtggcggtcgaggcggttgagtgagaagtgcccctgccacgcggggaagggcgccgcctggtctggcgagcgcaggtcccgtgatcccctctggctggtgcgcgcgggccgtgtgagcgatcgcggtgggcttgggcaggtgaggcgtgcgccggccggccgctgatgggctaccgttctgcctccgacaggttgtgtgtgtgtgtggatttacttggaggtgctttgcctaggagaaaggaggctggtccctgggggtgcctccgggttcctcggggtgcacggctgggggttccctggcgtggcctgctggggccctccgtccccccaagtgcagaccggcgatgtctgccctcctctgctgccatgcccgccccttctccctccccccgcaggccctgtgtggtcacgcattgggtggcatggggaaggggggctccctgctgtgaggaagagagagagggcagtgctgccacccgcgaaaacagagagtgaagagagccggctggggccgagttcccgtggccaccaccgcggtccgggttcctccctcggggcctccctcgtgccttacgcagctcgtggtgcagggttcgttggccctggaggggtggaaggtcccgtgccgtcgtcgtcgcgcgtcgtgggtagtgagggcttgttgggggcggggggaggaaggcaagtaggaagggtccggagagggtgggggagggcgtcccggtcgccccggttcgtcgccgcccctggtggcggcccggcgaccggcccacagccgctccagcgcccctcctccccaacacccctctgaggcacagtcctcctcgcccgcccgaccctgtctacccggcgcgcgtcgcggttgtgtccggggccggaagcccgccacgcggcccgtctgacagcgctcgtggccgcggtcctggggttcgcgtgcccctggcggtgactcgctgaatgctgcggtgtcgtccgccattgcgcgcccgcctccggctctcggccgcgcggtgcctggggcccggtctgtagcttccacgtcagggcagggaggcgccgccacgtcctcggacccgtcccccacctccgtttagtacgtaggaaatcccatgtaacttagcaaagctagcaagtccctaaactcggcgcagcgactgtaggggtggcctcccagtagcatcattaacatcaattgtaattggtaggcaatcgcttagtttcacatttcattacccgagttatacaaatgtgtaaaaaaaaaaaatacaattttaataaaagggagtaaaggataatatgagtaatattcacaatctctagttggaagaggtagtgttttctcagaaatgatgcattcctggagcaaggtcattttgtgtttggtttgttaaatatctatttccattttgacaaaccactggaaaagcccagcttcacaagggctctccatgagaacgatcacacaaaagaatacccataacacaaaatcaaaacaagggtggtccaggcgtcacattaaaggcttattaccaagttttcttagaagagataaagaacacaaagttacttttatgtgatggaaaacagagagaaagagtaaatgcaacaataaatgttaggcaacaacagtgaaaaccaagctgtggaaaaaaatgaatggaaatgttttgtttggtattgatttcctatcctgatatcagaaagtatgggaaagaacaaaggacatttttttgagacaaatagaacataaaacaaatgaatgttaaagactattttacagtgctaacaaaactatctgtgacttgttttttcccttaaaaaatacgattttgtacaattacatttatataaattattgaaataaaattgtaaagattgagaacaggctatggggttgccaaggggaaggggtggaggaaaacgtgtcagagtgtcagcaaagatcgcaagttggagcctggtggtgaggcaacagttctgcatcttgactttggaagtggtagttgcagagatctacaccacacaaaaatgaacagaacacacgcacacacatacacacgtacaaaaatgaatgcatgcaaaacggttgcgatctgagtaagctttctgaattgtacctatgtcagtttccaggttttgataatgctctatggctatgtgagatgtcaccactggaattagtgaatagtacctaagacatccctgtaccttttgcaacttcctgtgaatctataattatttcaaaagaaagttgaaagtcatagcagactttcacttcaaagaggaaaaatactgaagattaatgaaattgttgaagaacatcaaatactcaatagtctgtatgagagctgtattctgtccactcccagcacagctgtcatttagccttttcctgatgtgccctggaggacttgagctcctcttggattgccaaggccaatagtgtttacttgttactaaatttgtactaaaccccccaaaaatgaaaagtgattgaataatcatttataataacaactagtaattttacttataaagagacaatagtggtaatgaatttaaatatttagggtaaagaataggatcttcgtcagacaatactggcataatttagaaataaaaaataaggaatcagaaacataagtagttcagtattgtgaaaaaattctggatctgagaagcaaaagaacagaaattgtattgcatttctgctccaaacctgatgaatcaccttagatgtgttgtgtttctgtgccaaagctgttgaatcaccttaggcaatgcatgccctttccctgaatctgttttcttttctacaaaatgaagtgagctagatcatctccaaggtcccccaaatattcacattttcggctccatatgaacttcagttgaattcctaatttcagtgtggataatacatgtgtgctgcaccacaagcagtgtgtctaaatgctcatgttggtcctaaaaactaattatgagcagtttggaaattctgttgttgtacaatctgcaaagggatatttgtgagtgctttgaggccatggtgaaaaaggaaataccttcacataaaaactataaagaaggtttctgagaaactgctttgtgatgtgtgcattcatctcactgagttgaacatttcattcctttgatgagtctggaaactctgttcttgtacaatctgcaaagtggtatttgtgagtgctttcaggcctatggtgaaaaaggaaatatcttcacataaaaactagacagacgctttctgagaaactactttgtgacgtgtgcattcatctcaaagagttaaaccattcttttgattgaaatgttaggaaatggtgtttttgtagaatctgaagagggatatttgtgagcgctttgaggcctttggtgaaaaagtaaataccttcacctttctcagatgagtaggttgcaaaaattttttcccattctgtaggatgactgttcactctgatggtggtttctttagctgtgcagaagctccttagtttaattagatcccatttgtcaattgtggctttgttgccattgctttaggtgttttagacatgaagtccttgcccatgcctatgccctgaatggtatttcctaggttttcttctagggattttatgtgaagcattcttttgattaatcagtttggatactctgttcttgtagaatctgcaaggagatatttgtgagcgctttgaggcctttggtgaaaaagtaaataccttcacataataaatagacagaagctctctgagaaacctccctgtctgtgtgcattcatctcacagagttgaaactgtcttttggctgagcagtttgaaaactgtctatttgtagaatctgcaaagggatatttatgagcactttgaagcctatggtgagaaaggaaatatcttcacataaaaactggatagaagatttctgagaaacctctttgtgatgtgtgcatttatctcacagtgttgaaccattcttttgattgagcagtttgtaaacagactttttgtagaatctgcaaagggatatttgtcagctctatgaggcctatggtgaaaaaggaaatatcttcaataaaaactataaagaatgtttctgagaagctgttttgcaagatgtgcactcatctcagagagataaaagtttctattctttgatgagtctggaaactctgttcttgtaaaatctgcaaagggatatttgtgagtggctttaggcctgtggtgaaaaaggaaatatcttcacataaaaactagacagaagatttcagagaaagttctttgtgatatgtgcattcatctcacagagttgaaccactcttttgattgagaagtttggaaacagtcttttcagagaatctgcaaagggatattttgagcgctttgataggtatggtgaaaagggaaatatcttcacttaaaaactggacagaagctttctgagaaacttctttgtgatgtgtgcattcgactaacagagttgaacctttcttttgattgggcagtttggaaagagtcctttcctagaatctgcagagggatatgtgtgagccctttatggcctaaggtgaaataggaaatatcttcatataaaaactagacagaagcattctgagaaacttctttgtcaagtgtgctttcatctcacagagtggaacctctcttttgattgaggagtttggaaacagtctttctgtagaatatgcaaatggatatttggagcgctttgaggcctatggtgaaaaaggaaatatcttcacctaaaaactagacagaaacattatgagaaacttctttgtgatgtatgcattcatatcacagagttgaacctctcttttgattgaggagtttggaaacagtctttttgtagaatatgcaaatggatatttagagtgctttgaggcctatggtgaaaaaggaaatatcttcacctaaaaactacacagaagcattctgagaaacttctttgtgatgtatgcattcgtttcacagagttgaacctttcttatgattgagcagtttcaaagcagtccttttgtagaatatgcaaagggatatttgtgagcccattgaggcctgtggtgaattaggaaatatcttcacatataaactagtcagaagatttctgagaaacttgtttgtgatgtgtgcattcatctaacagagttgaaactttcttttgattgggcagtttggaaagtgtccttttctagaatctgcagagggatatttgtgagccctttatggcttaaggtgaaataggaaatatcttcacataaaaactagacagaagcattctgagaaacttctttgtcaagtgtgctttcatctcacagagttgaacctctcttttgattgaggagtttggaaagtctttttgtagaatacacaaatggatatttggaactctttgaggcctatggtgaaaaaggaaatatcttcacctaaaaactacacagaagcattctgagaaacttctttgtgatgtatgcattcatatcacagagttgaacctttcttatgattgagcagtttcaaagcagtccttttgtagaatatgcaaagggatatttgtgagcccattgaggtctgtggtgaattaggaaatatcttcacatataaactagtcagaagatttctgagaaacttatttgtgatgtgtgctttcatctcacagagttgaacctttcttttgaatgagcagtttggaaacacactttttgtagaatctgcaaatggatatttagagcactttgaggactatggtgaaaaaggaaatatcttcacataaaaactagaaagcaacattctatgaaacttctttgtgatgtgtgctttcatctcacagagttgaacctctctattcattgaacagtttggaaaccatctttttgtagaatctgcaaatggatatttggagcattttgaggccttggtgagaatggaaatatcttcacataaaaactagatagaagcattctgagaaacttcttggtgatgtgtgcatttatcacacagagttatacctttcttttgattgaacactttggaaacagtctttttgtagtatctgtagagggatgtttgcgagcgatttgaggcctatggtgaaaaaggaaatatcttcacataaaaactagacagaagctttctgagaaacttctttgtgatgtgtgaattcatctcacagtgttgaacctttctttggatagagcagtttggaaacaatccttttgtagaatctgcaaaggtatatttctgagcccattgaggcctatggtgaaatatgaaatatcttcccataaaaactagacagaaggtttctaagaaactcctttgtgatgtgtgcttccatctcacagagttgaacctttcttttgattgagcagtttggaaacactctttttgtagaatctgcaaatggatatttggagcactttgaggcctatggtaaaaaaggaaatatcatcacataaaaattagacggaagcattctgagaaacttctttgtgatgtttgcatccatctcacacagttgaacatttctttgattgaagattgggaaacagtctttttgtaaaatctacgaagggataattgtgaaccctttgaggcctatggtgaagtaggaaatatcttaacataaaaactacacggaaacattttgagaaacttttttgtgatgggtacattcatctcacagagttgaagctttctttttctagagcagtttggaaacagtcctattgtagaatccccaaagggatatttctgagcccattgaggcctttggtgatataggaaataccttcacataaagctagacggaagctttctgagaaacttcttttcaatgagtgctttcatctcaaagagttgagcatttcggaaacactctttttgcctaatctgcaaatgcataattggagcatttttaggtctatggtgaataaggaaatatcttcccataacaactgaacataagctttctgagaaactactttgtaatgagtgcattcatctcacagagttgaaactttcttttgatgagccgtttgtaaactgtctttttgtacaatctgcaaatgcatattgggagcactttgaggcctatggtgaaaaaggaaatatcttcagataaacactaaacagaagctttctgagaaacttctttgtgatgggtgcattcatatcacagagctgaaactttcttttgatttagcagtttgtaaacagtcttttggtagaatctgcaaatggacactttgagtactttgaggcctatggtgaaaaaggaaatatcttcacaaaaaaactagaaagatacattctgagaaacttctttgtgatgcgtgctttcaactcacagagttgaaactttcttttcactgagcaatttggaaacagtctttttgtggaatctgcaaaaaatatttttgagccctttatggcccatgctgaaacaggaaataacctcacagaaaaaccagacagaagctttctgagaaacttctttgtgatgtgtgctttgaactcacagagttgtacctttcttttgattgagcagtttggaaacagtctttttgtggaatcagcaaatggatgtttggagggctttgaggcctatggtgaaaaaggaaataccttcatataataaatagacagaagcattgtgagaaacatctctgttatgtgtgcattcatctcatagagttgaacctttctttgaatggcttggaaactctttttgtggaatcagcaaatggatgtttggagtgctttgaagcctatggtgaaaaaggaaataccttcacataaaaaatagacagaagcattgtgagaaacatctctgtgatgtgtgcattcatctcatagtgttgaacctttgtttgatcgagcagtttggaaacagtccttttgtagaatctgcaaagggatatttctgagcccattgaagcctagggtgaaaaagaaatgtcttcacataaaaactagacagaagcattctgataaacttttgtgatgtgtccattcatctcacagagttgaaacttcctttggattgagcagagtggaaacagtctttttgtagaatctgcaaaaagtatttttgagccctatatggcccaaggtgaaataggaaatatcttcacaaaaaaactagacagaagcattctgagaaacctctttgtgatgtgtgcttctgtgtcacagagttgagcatttcttttgattgagcagtttggaaacactctttttgtagaatctgcaaatgggtatttggagcgctttgaggcctacagtgaaaaaagaaatatcttcacataaaaactagacagatgcattctgtgaaacttctttgtgatgtgtgcattcatctcacagagttgaatctttctttggattcagcagttttctaaacagtccttttgtagaatctgcaaagagatatttctgagcccattgaggcctatggtgaaaaaggaaatatcttcaaataaaaacaaaacagaagctttctgagaagcttctttatgatgtgtgcattcatctcacagagtggaatctttcttttgcttgagcagtttggaaacagtctttttgtaaaatctgcaaaagggtatttctgagccgtttgaggctgatggtgaaaaagaaatatcttcacataaaaactagacagaagcattccgagaaacttgtttctgatgtgtgcattcatctcacagggttgaacctttcttttgtttgagcagtttggaaacagtcttttttttgaatatgcaaacggatatttttgagccctttacagcctatggtgaaataggcaatatcttcacataaaaattagacagaatatttctgagaaaatgctttgtgatgtgtgctttcatctcacagaggtgaacttttgttttgattgagtagtttggaaacagtctttctgtagaatccacaaatggatatttgcagtgcttttaggcctatggtgaaaaaggaaatatcttcacaacaacactaaaaagaagctttctgagaaacttctttgtgatgtgtggattcatatcacagagctgatcctttcttttgattgagcagattggaaaccgtctttttgtacaatctgcaaagggatatttctgagctgtttgatgcctatggtgaaaaagaattatcttcacataaaaactagacagaattattgtgagacacttccttgtgatgtgtgccttcatctcacagagttgaacctttcttttcttggagcagtttggaaacagtctttttgaagtatctgcagagggatatttgtgagcagttaaaggcctatggtgaaaaataaaatatcttcacataaaatctatacagaagcattctgagaaacttgttttttatgtgtgcattcatctcccagagatgaatctttcttttcattgagcagtctggaaacagtctctttatacaatgtgcaaagggatatttctgagaggtttgaggcctatggtgaaaaagtaataccttcacataaaaactagacagaagcattctgagaaacttcttttttatgtgtgcattcacctcacatagttgaaacttccttttcattgagcagtttggaaacagtctttttgtagaatctgcaaagggatatttgtgattcctttgagtcctgtggtgaaataggaaatatcctcaaataaaaactagacagagctttccaagaaacttctttttgatgtgtgctttcatctcacagagttgaacctttcttttgattgaacagtttgcaaacagtctttttgtggaatctgcaaatggatgtttggagtgttttgaggcttatggtgaaaaagtaaatatcttcacataaaaactagattcatgttttctgggaaacttctttgtgatgggtgtatgcatctcaaagagttgaatctttcttttgattgagtagtttggaagcagtctttttggagaatcttcaaagggatgtttttgagtggtgtgaggcatgtggtgaaaaaggaaatatcttcatataaaaactagacagaagcattctgagaaatcactttgtgatgcatgcattcatctcacagagttgaattttctttcattgagcagtttggaaacagtctttttgtagaatatgcaaagggatatttgtgagctttttgaggcctattgtgaaaaaggaaatctgcacaaataaaatctagacagaagccttctgagaaacttctttgtgatgtgtgcattcatcacacagaattgaacctttctttcgattgagtagtttggaagcagtctttttgtagaatttgcaaaggaaaatttgtgaacactttgaggcttatggtgaaaaagaagtatcttcacataaaaactagtcagaaacgttctgagaaacttctttgtgatgtgtgcagtcatctcacacagctgaagtttcatttgattgaccagtttggaaacagtcctttagtagaatctgaaaagggttatttatgagcagtttgaagcctatagtgaaaaagggagtatcgacaaataaaacctagacagaaactttctgagaaacttctctgtgatgtgtgcatccatctcacagagtaaaaactttctttgattgagcagtttggaaacagtctttttgtagaatctgcaaagggatacatgtaggcggtttcaggtctatcatgaaaatggaaatatcttcacataaaaactagaaagaaggtttctgagaaaattctttgagatgtgctcattcgtctcacagatttgaagtgttcttttcattgaccagtttggatagagtctttttgtagaatctgctttgcaatatttgtgagccctttgaagcctatggtgaaaaaagaaatatcttcacacaaaaactagacagaagtttctgagaaacttcgttgtgatgtgtgcattcatcccaaagagttgaacctgtctttggattgagcagtttggaaacagtcctttgtagaatgtacaaagggatatttgagatccctttttggcctatggtgaaaaaggaaatgtcttcacataaaaactagacagaagcattctgagaaacttcttttttatgtgtgcattcttctcacagagttgaacctttctttagatagagcaggttggaaaatgtctttttgtagaatctgcaaagtgataatttgaatgctttgagacttatggtaaaaaaggaaatatcttcacataaaaactggacggaagctttctgagaaactttgtgatgtgtgcattcatctcaaagagttgaagctttatttcagttgagcagtttgggaacagtctttttgtaaaatctgtaaagggacatttgtgagcactttgaggcctatattgaaaaaggaaacatcttcaaataaaaactagacagaagctttctgagaaacttctttgtgatgtgtgcattcacctcacagagttgaacctttcttttgattgagtagtttggaaacactctttttgtagaatctgcaaagggttatttatgagcagtttgaagcctatggtgaaaaaaagagtatcaacaaataaaaactagacagaaactttctgagaaacttctctgtgatgtgtgcattcatctcacagagtggaagctttctttgagcaggttggaaacagtctttttgtagaatctgcaaagggatatatgtaggcggtttgaggtctatcatgaaaacagaaatatcttcacataaaactaactgttcaatgggaagaaacttttacttgagtgtgatgaatgcacacgtcacaaaggagttactcagaaaacttctttctactttcaatgtgaagatatttcctttttcaccatgtgcctcaacgcactcccagatatccctttgcagattctacaaaaagactgtttccaaactgctcaataaacaaaatggttcaaccctgtgagacgaatgtgcacatcacaaagaagcttctcagaagacttccttcttgtgtttatgtgaagatatttcctttttgaacataggcctcaatgcactcccaaatatacctttgcagaatctacaaaaagactgtttccaaagtgctcaatcaaaagaaagtttcaactctgttagatgaatgcacacatcagaaagtagtttcttagcaagcttctcactagtttttatgtgaaaatagttccttcttcaacgtgagtctcaaagcactcaaaaatatccctttgcagactctagaataacagagtttacaaactgctcaatgaaaagaaacgtttacctctgtgagatgaatacacatatcttaaagcagcttctcagaatgcttctttctagtttttatgtgaagatatttcctttttcaccatggtcctcaaagcgctctaaatatccctttgcagattgtacaaaaagactgtttccaaactgctcaatcaaaagaaatgttaaactctatgagataaatgcacacatcacaaaaagtttctcggaaaacttttgtctagtttttatatgaagataattccttattcaccataggcctcaaagcactacaaatatccctctgcagattctacaaaaagactgtttgcaaactgctcaatccaaagaatgtttcaactctgtgagatgaatgcacacaccaaaagaagtttctcagaaactttctttatggtttttctgtgaagatatttcctttttcaccataggcctcaaagccctcacaaatatccctttgcagattctacaaaaagactgtttccaaactgctcaataaaaagaattattgaatactgtgagatgaatgcacacagctcaaagaagtttctcagaatccttcagtctggtttttatgtgaatatatttccttttacaccataggcctcaaagcactccaaatatccatttgcagattctacaaaaagactgtttccaaatggctcaatcaaaacaaagattcaactctgtgtgatgaatgcacacatcacgaagaagtttctcagaatgcttctgtctcgtttttatgtgaagatacttgctttttcaccataggcctcaaagtgctcacaaatatccctttacagattctacaaaaatactttttccaaattgctcaatcaaaagaaagtttcaactctgtgagatgtatgcacaccacaaagaggtttctcagaaaacttctctctagtttttatgtgaagatattttctttttcaccataggcctcaaagtactcacaaatatccctttgaagactctagaagaacagtttccagactgaccagagaaaagaaacgtttacctctgtgagatgaatgcatacatcacaaagctgtttctgagaaaccttgtttatactttttatgtgaatatatttcctttttcaccataggtctcaaagcactcataaatatacctttacagattctacaaaaagacagtttcccaactgctcagtcaaaagaattgttgaactctgtgagatgaatgcatacatcacaaagcagtttgtcagaattctttagtctagtttttatgtgaagatattttctctttcaccataggcctcaaagcgctcagaaatatccctttacagatttcacaaaaagacttttccaaactgctcaatcaaaacaaagtttcaattctgtgagataaatgcacacatcaccaaaaagtttctcagtatgcttctgtctagtttttatgtgaagacaattcctttttcaccatagggctctatgcactcaaaaataccccttagcagattctaaaacaacagagtttcccaaatgatcaaagaaaagaatcgttttcctctgtgagatgaatgcagacatcacaaaacagtttctcagaaaacttctttatagttttctgtgaagatactactttttctgcataggcctcaaaatgctcacaaatatccatttgcagattctgtaaaaatactggttccaaactgctgaatcaaaagagaggttcaaatctgtgagatgaatgcacatatcacaaagaagtatctcagaaactttccttataatttgtatgtgaagatatttcctttgtcaacataggcctcaaagtgatcaaaaataccctttttcagattgtacaagaacagagtttccagactgatcagagaaaagaaatgcttacctctgtgagatgaatgcacacatcacaaggctgtttttaggaaacctgcttcacagttgttatgtgaagatacttccttttccaccattggcctcacagcattccaaatatccacttgcagattctacaaaaagagtgtttcaaaactgctcaatcaaaggaaaggttgaactctgagatgaatgcaaacatcacaaagaagtttctcagaatgtctctgtctaatttttatgttaaggtatttccttttccaccataggcatcaaagtgctccaaatatccacatgcagataggacaaaaaggctgcttccaaactgctcaatcaaaagtgtggttcaactctctcagatgaatacacacatcactaagaatgcttctgtctagtttttatatgaagatatttccttttccaacataggcctcaaatcgccccaaatacccacttgcagattctacaaaaagagtatttcaaaactggtcaatcaaaagaaaattggaactcggtgagatgaatgcacacatcacaaagaagtttctcagaatgcttctgtctagtttttatgtgaagatatttcctttcccactctaggccccaaagcgctccatatatgcaattgcagattctacaaacagactgtttcaaaactgctcaatcaaaagaaacgttcaagtctgtgagttcaatacacatatcacaaagaagtttctcagaatgcttctgtccagtttttatgtggagatatttccttttccaacattgggctaaaagcgacacaaatatccacttgcacattctacaaaaagagtatttcaaaaatgctcaatcaaaacaaaggctcaacactgtgagatgaatgcacacatcacaaagcagtttctcagaatgcttctgtcgagtttttatgtgaagatatttcctttcccactctaggccccaaagcgctccatatatgcaattgcagattctacaaacagactgtttcaaaactgctcaatcaaaagaaacgttcaagtctgtgagttcaatacacatatcacaaagaagtttctcagaatgcttctgtccagtttttatgtggagatatttccttttccaacattgggctaaaagcgacacaaatatccacttgcacattctacaaaaagagtatttcaaaaatgctcaatcaaaacaaaggctcaacactgtgagatgaatgcacacatcacaaagcagtttctcagaatgcttctgttgagtttttatgtgaagatatttccttttccactagagtccacaaagcgctccaaatatccaatttcagattctacaaaaagagtgtttcaaaactgctcaaacaaaagaaagattcaactctgtgagttgaatgcacacagcacaaagaagtctctcagattgtttctgcctagttttcatgtgaagatattctcttttccaccataggccccaaagtgcaccaaatatccacttgcagattctacaaaaagtgtgtttcaaaactgctgaatcaaaagaaaggttcaactctgttaggtgaatgcacacattacaaagaagtttctcagaatgcttctgtctagtttttatgtggagatatttccttttccactagaggctgccaagtgccaaaatatccacttgcagatactacaacaagagtgtttcaaaactgctctatcaaaagaaatgttcaactctttgaggtaatgcacacatcacaaagaagttcctcagaatgcttctgtctaatttttatgtgaagatatttccttttccaccataggccttaaagcactccaaatatcgaattgcagatactacaataagactattcccaagctgctcaaacaaaacaggtgttcaactctgtgagttgaatgcacacttaacaaagaagtttcttagaatgcttctgtctagtttttatgtgaagatatttccttttccatcgtaggccaccaatggctccaaatatccacttgcagattgtacaaaaagagtgtttcaaaactgctgaatcaaaacaaaggttcaactctgtgagatgaatgcaaacatcacaaagaagtttctcagaaagcttctgtctaatttttatattaaggtatttccttttccaccataggcctcaaatcattccaaatatccacttgaagattctacaaaaagagcgtttcaaaacttctcaatcaaaagaaaagtccaattctgtgataggaatgcacacatcacaatgaagtttctcagaatgcttctgtgtagtttttatgtgaagatatttcctttgaacgtaggcctcaaagcgctaaaaatccaattgcagattctacaaaaagagtttttcaaaattgctgagtcaaaagaaaccttcaactcagtgagatgaatgcacccatcaaaaagaaggttctcagaatgcttcagtctagtttttatgtgaagatatttccgtttccagtagaggccgcaaagtgctccaaatatgcacttgaagattctctaaaaagagggtatcaaaactgctcaatgaaaagaaaggtttaactatgtgaggtcaatgcacatatcacaaagaagtttctcagagtgctcttgtctagtttttatgtgaagatatttccttttccaccatgagcctcaaagcactccaaatatacatttgcagatactagagaaacactgtttccaaactgctcaatcaaaaggaagtttcaactctgagagtttaatgcatacatcacaaagaagtttctcagaatgcttctctgtagtttttatgtgaagttatttccttttccaccataggcctcatagcactccaagaatccaattgcagattctacaaaaagcctttttccaaactgctgaatcaatagaaaggttcaactctgtgagttgaatgcacataccacaaagaattttctcagaatgcttctgtctagtttttaagtgaagatagttccttttccaccttaggcctcaaagagatcaaatatccattgcagattctacaaaaagtgtgttttaaaactgctcaatccaaagaaaggtttaactcggtgagttgaatgcacacatcacaaagaagtttctcagaatgcttctgtctaggttttatgtgaagatattaccttttccactttaggccacaaagctctgtaatatccacttgaagattctacaaaaagagtgtttcaaaactgtttaatgaaaagaaatttcaacactttgagatgaatgcacacatcacaaagaagtttctcagaatgcttccatctagtttttatgtgaagatatttccttttccaccataggccgcaaagcgctccaaatatccacatgcagatactacaaaaagactgtttccaaactgctcaataaaaagagtagttcaactctcccagatgaatgcaaacatcacgaagtatctcagaatgcttctgtcaagattttatgtgaagatatttcctttccaaatataggcctctaagcactccaaatatacatttgtagatgctacaaaaagaaagtttccaaacttctcaataaaaagataggtgcaactctgtgagctgaatgcacacatctcaaagaagtttctcagaatgcttctctctagtttttatgtgaagatatttccttttccaccagcggctgcaaagcactccaaatatccatttgcagattctacaaaaaaactgtttccaaactgctcaatcaaaagtaagtttcagctctgtaagaagaaggcacacatcacaaagaagtttctcagaaactttctgtctagtttttatatgaaattacttttagtttccctagaggccacaaagggctcagaaatatccctttgcagattctacaaaaggactgattgaaaactgctcaatctaaagaatggttcaactctgtgagatgaatgcacacaacaaagagaagtttcccagaatgcttctgtctagtttttatgtgaagatatttctgtttccatcataggccaccaatcgctccaaatatccacttgcagatcctacaaaaagagtgtttcaaaactgctcaatccaaagaaagtttcaacactgtgagacaaatgcacacatcacaaagaagtttctcagaatgcttctgtctactttttatgtgatgacattaaattttccaccataggcctcaaagcgctccaaatatccagttgcagatcctacaaaaagtgtgtttcaaagctgcttaattaaaagaaagtttcaactctgtgagatgaatgcacgcatcaccaagaagtttttcagaatgcttctgtctagtatttatgtgaagatatttccttttccaataaaggtcgcaaatgatgtaaaatacccacttgcagattctacaaaaagggtgtttaaagactgttcaatcaaaagaaagattaaacgttgtgagttgaattcacccatcacaaacaaggttctcagaatgcttctgtctagtttttatatgaagatatttccttttgcaccataggcctaaaagtactccaaataaccacttgcagattgcactaaaagtgtgtttcaacactgctcaattaaaagaaagtttcaactctgtgaaatgaatgctaacaacataaagaagtttctcagaatgctcctggttagtttttttgtgaagatatttccttttccaccataaggccccaaagcactccaaacatccacttgcagattctacaaaaggactgtttcaaaactgctcaatgaaaagaagggttcaactctgtgagatgaatgcacacaacagaaagaagtttctcagaatgcttctgtcaatttttatgtgaagatatttccttttccaccataggcctcaatgcattccaaatatccaattgcagattctacaagaagagtgattcaaaactgctcaatcaaaagaaagtttcaactctgtgagttgaatgcacacatcacaaataagtttttcagaatgcttctgtgtagtatttatgtgaagatatgtccttttccaccataggcctcaatccgctccaaatatccatttgcagatactacaaaaacagtgtttcaaaactgctcaatcaaaagaaagtttcaactctgtgagatgaatgcacacatgacaaagaagtttctcagaatgcttctgtcttgtttttatgtgaagatatttccttttaaaccacaggctacacagcgctccaaatgtccacttgcagattctacagaaagagtgtttcaaaactgctcaataaaaagaaaaattcaactctgtaagatgaatgcacacatcacaaacatgtttctcagtttccttctgtctagtttttatgtgaagatatttccttttacaccattggccgcaaagtgctccaaatatcctcttgcagattctacaaagagagtgtttcaaaactgctcaatcaaaagacatgttcaacactgtgagatgaatgcaaacatcacaaagaagtttctcagagagcttctgtgtcgtttttatgtgaagatatttccttttccaccataggcctcaaggtgctccaaatatccactagcagattatacaaaaagagtttttcaaaactgctcaatcaaaagaaatattcaactctgtgagatgaatacacacatcacaaagaagtttctcagaatgcttctgtctattttttaagagaagatatttccttttccactagaggccacaaagcgctccaaatatacacttgcagattctacaaaaagagggtttcataactgctcaatcaaaagaaagtttcaacactgtgaggtgaatgcacacatcagaaagaagtttctcaaattacttctgtctagtatttttgtgaagatttttccttttcctctatgcctcaaactgctccaagtatccatttgcagatactacaaaaagagtgtttcaaaactcctcaatcaaaagaaagtttcaactctgtgagttgaatgcacacatcacaaagaagtttctcacaagtttctgcatagtttttatgtgaagatatttccttttccaccataggccgcaaagtgctccaaatatccacatgcagaatctacaaaaagagtgtttcaaaactgctcagtcaaaagaaattttgaactctgtgagatgaatgcacacatcaccaagaagtttctcagaattcttctgtctagcttttatgtgaagatatttccttttccaccataggactcaaagcactgtatatatccacttgccaattctgcaaaaagagtttcaaaactgctcaatcaaaagaaaggttgaactctattagatgaatgtgcacatcacaaagaagtttctcagaaggcttgtgtcttgtttttaagtgaagatatttccttttccatcataggcctcaatatgttccaaatatccactggcagattccagaaaaagagtgttgcaaaagagctgaatcaaaagaaagtttcaactccgttagatgaatgcacacatcacaaagaagtttctcagaatgcttctgtctagtttttatgtgaagatatttccttttccactctaggccacaaagctctccaaatgtccacttgcagtttctataaaaagagtgtttctaaactgctcaataaaaaaaaaggttcaaatctgtgagatgaatgcacacattacaaagaagtttctcggaatgcttctgtctactttttttgtgaaggtatttccttttacactgtagtcctcaaagcgctccaaatatccatttgcagatactacaaaaagactgtttccaaactgctcaataaaaggaaaggttcaactctgtaagttgaatgctcatatcagaaagtagtttctcagaatgcttctgtctagttttaatgtgaagatatttccttttccactataggccgcaaagtgctgcaaatagccactttcagattctagaaaaagagggtatgaaaactgctcaatcaaatgaaaggttcaattctgtgagttgaatgcatgtattgtaaagaagtttctcagaatgcttctgtctagttttttatgtgaagatatttccttttccaccttaggccacatagtgccccaaatatccaattgcagattctacaaaaggattgtttcaaaacctgctcaatcaaagaaatgttcaactgtgtgagatgaatgcaaacatcacaaagaagtttctcagaattcttctgtctagttttaatgtgaagatatttccttttcccccaaaggccacaaagtgctccaaatagccacttgcagattctacaaaaagactgtttcaaaactgctcaatcaaaagaaaggttcaacactgtgaattgtatgcacacatcaaaaagcaatttctatggttttaggtttaacatttaggtgtttaatctatcctgaattaatttttgtataaggtgtaaggaagggttccagttttagctttctacatatggctagccagttttcccagcaccatttattaaatagggaatcctttcctctttgcttgtttttctcaggtttgtcaatgatcagatagttgtagatatgcagcattatttctgaaggctttgttctgttccatggatctatatctctgttttggtacaagtaccatgctgttttggcgactgtagccttgtagtatagtctgaagtccagtagcgtgatacctccagctttgttcttttgacttagggttgacttggcaatgagggctcttttttggttatatgtgaacttcaagtagttttttccaattctgcagagaaagtcattggtagcttgatggggatggcattgaatctataaattaccttgggcagtatgaccattttcacgatattgattcttcctacccatgagcatggaatgttcttccttttgtttgtttcctcttttatttccttgagcagtggtttgtagttctccttgaagaggtccttcacatcccttgtaagttggattcctaggtattttattctttttgaagcaattgtgaatgggagttcactcatgatttggctctctgtttgtctgttattggtgtataagaatgtttgtgattattgtacattgattttgtatcctgagactttgctgaagttgcttatcaacttaaggggattttgggctgagacaatggggtttcttagacatacaatcatgttgtctgcaaacagggacaatttgacttcctcttttccgaattgaataccatttatttccttctcatacctaattgccctggccagaacttccaacactatgttgaataggagtggtgagagagggcatccctgtcttgtgccagttttcaaagggaatgcttccagtttttgtccattcagtatgatattggctgtgggtttgtcacagatagctcttattattttgacatacatcccattaatacctaatttattgagaggttttagcacgaagggttgttgaattttttttgaatgttttttattttatttttttttattttaagttttagggtacatgtgcacattgtgcaggttagttacatatgtatacatgtgccatgctggtgcgctgcacccactaactcgtcatctagcattaggtatatctcccaaagctatccctcccccctccccctaccccacaacagtccccagagtgtgatattcccattcctgtgtccgtgtgttctcattgttcaattcccacctataagtgagaatatgcagtgtttggttttttgttcttgtgatagtttactgagaatgatgatttccaatttcatccatacccctacaaaggacaagaactcaacaatttttatggctgcatagtattccatggtgtatgtgtgccacattttcttaatccagtctatcattgttggacatttgggttggttccaagtctttgctattgtgaataatgccgcaataaacatacgtgtgcatgtgtctttatagcagcatgatttatagtcctttgggtatatacccagtaattggatggctgggtcaaatggtatttccagttctagatccaggaggaatcgcaacactgacttccacaatggttgatctagtttgcagtcccaccaaccatgtaaaagtgttcctatttctccacatcctttccagcacctgttgtttcctgactttttaatgatcaccattctaactggtgtgagatggtatcacattgtggttttgatttgcatttctctgatggccagtggtgatgagcattttttcatgtgttttttggctgcacaaatgtcttcttttgagaagtgtctgttcacgtcctacacccactttttgatggggttgtttgtttttttcttgtaaatttgtttgagttcattgtagattctggatattagccttttgtcagatgagtaggttgcaaaaattttctcccattttgtaggtttcctgttcactctgatggtagtttcttttgctgtgcagaggctctttagtttaattagatctcatttgtcaattttggcttttgttgccattgtttttggtgttttagacatgaagtccttgcccatgcctatgtcctgaatggtaatgcctagggttgcttctagggtttttatggttttaggtctaacgtttaagtctttaatccatcttgaattgatttttgtataagatgtaaggaagggatccagtttcagctttctacatatggctagccagttttcccagcaccatttattaaatagggaatcctttccccattgcttgtttttctcaggtttgtcaaagatcagatagttgtagatatgtggcattatttctgagggctctgttctgttccattgatctatatctctgtttcggtaccagtaccatgctgttttggttaccgtagccttgtagtatagtttgaagtcaggtagtgtgatgcctccagctttgttcttttggcttaggagtgacttggcgatgtgggctctcttttggttccatatgaactttaaagtagttttttccaattctgtgaagaaaggcattggtagcttgttggggatggcattgaatctgtaaattaccttgggcagtatggtcattttcacattattgattcttcctacccatgagcatggaatgttcttccatttgtttgtatcctcttttatttccttgagcagttttttgtacttctccttgaagaggtccttcacatccattgtaagttggattcctaggtattttattccctttgaagcaattgtgaatgtgagttcactcatgattttgctctctgtttgtctgttgttggtgtataagaatgcttgtgatttttgtacattgattttgtatcctgagattttgctgaagttgctcatcagcttaaggagactttgggctgagacaatggggttttctagatatacgatcatgtcatctgcaaacagggacaatttgacttcttcttttcctaattgaataccctttatttccttctcctgcctaattgccctggccagaagttccaacactatgttgaataggagtggtgagagagggcatccctgtttgtgccagttttcaaagggaatgcttccagtttttgcccattcagtatgatattggctgtgggtttgtcatagatagctcttattattttgaaatacgtcccatcaatacctaatttattgagaattcttagcatgaaggttgttgaattttgtcaaaggccttttctgcatctattgatataatcatgtggtttttgtctttggctctgtttatatgctggattacattcattgatttgcatatattgaagcagccttgcatcccagggatgaagcccacttgatcatggtggataagcttttggatgtgctgctggattcgttttgcctgtattttattgaggatttttgcatcaatgttcatcaaggatattggtctaaaattctctttttttgttgtgtctctgcctggctttggtatcagaatgatgctggactcataaaatgagttagggaggattccctctttttctgttgattggaatagtttcagaaggaatggtaccagttcctccttgtacctctggtagaattcggctgtgaatccatctggtactggactctttttggttggtaagctattgattattgccagaatttcagagcctgttattgttctattcagagattcaacttcttcctggtttagtcttgggagggtctatgtgttgaggaatttatccatttcttctagattttctagtttatttgcgtagaggtgtttgtagtattctctgatggtagtttgtatttctgtgagatcagtggtgatatcccctttatcattttttattgcgtctatttgaatcttctctctttttttctttattagtcttgcttgcggtctatcaattttgttgatcttttcaaaaaaccagctcctggattcattaatttttgaagggttttttgtgtctctatttccttcagttctgctctgattttagttatttcttgccttctgctagcttttgaatgtgtttgctcttgcttttctagttcttttaattgtgatattagggtgtcagttttggacatttcctgctttctcttgtgggcgtttagtgctatagatttccctctacacactgctttgaatgcggcccagagattctgatatgttgtgtctttgttctcgttggtttcaaagaacatgtttctttctgccttcatttcgttatgtacccagtagtcattcaggagcaggttgttcagtttccatgtagttgagtggtttgagtgagattcttaatcctgagttctagtttgattgcactgtggtctgagagatagtttgttataatttctgttcttttacatttgctgaggagagctttacttccaagtatgtggtcaattttgtaataggtgtggtgtggtgctgaaaaaaatgtatattctgttgatttgggttggagagttctgtagatgtctattaggtctgcttggtgcagagctgagttcaattcctgggtatccttgttgactttctgtcttgttgatctgtctaatgttgacagtggggtgttaaagtctcccattgttaatgtgtgggagtctaagtctctttgtggatcactcaggacttgctttatgaatctgggtgctcctgtattgggtgcatgtatttttaggatagttagctcttcttgttgaattgatccctttaccattatgtaatggccttctttgtctctttttatctttgttggtttaaagtctgttttaccagagactaggattgcaacccctgcctttttttgttttccatttgcttggtagatcttcctccatccttttattttgagcctatgtgtgtctctgcacgtgagatgagtttcctgaatacagcacactgatgggtcttgactctttatccaatttgccagtctgtgtcttttaattggagcatttagtccatttacatttaaagctaatattgttatgtgtgaatttgatcctgtcattatgatgttagctggttattttgctcgttagttgatgcagtttcttcctagtctcgatggtctttacatttttggcatgattttgcagtggctggtaccggttgttcctttccatgtttagtgcttccttcaggagcttttttagggcaagcctggtggtggcaaaatctgtcagcatttgcttgtctgtaatgtatttcatttctccttcgcttatgtagcttagtttggctggatatgaaattctgggttgaaaattattttctttaagaatgttgaatattggcccccactctcttctggcttgtagggtttctgccaagagattcactgttagtctgatgggcttccctttgagggtaacccgacctttctctctggctgcccttaacattttttccttcatttcaactttgctgaatctgacaattatgtgtcttggagttgctcttctccaggagtatctttgtggcgttttctgtatttcctgaatctgaatgttggcctgccttgctagattggggaagttctcctggataatatcctgcagagtgttttcctacttggttccattctccctgtcactttcaggtacaccaatcagacgtagatttggtctcttcacatagtcctatatttcttggagggtttgctcatttcttttcattcttttttctctaaacttcccttctcacttcatttcattcatttcatcttccatcgctgataccctttcttccagttgaatgcattgggctcctgaggcttccgcattcttcacgtagttctcgagccttggttttcagctccatcagctcctttaagcacttctctgcattggttcttctagttatacattcttctaaatttttttcaaagttttcaacttctttgcctttggtttgaatgtcctcccatagctcagagtaatttgatcgtctgaagccttcttctcttagctcgtcaaagtcattctccatccagatttgttccattgctggtgaggaactgcgttcctttggaggaggggaggtgctctgctttttagagtttccagtttttctcttctcttttttacccatctttatggttttatctacttttggtctttgatgatggtgatgtacagatgggtttttggtgtggatgtcctttctgtttgttagtttttcttctaacagacaggaccctcagctgcatgtctgttggaataccctgccttgtatggtgtcagtgtgcccctgctggggggtgcctcccagttaggctgctcgggggtcaggggtcagtgtcccacttgaggaccagtcttccagttctcagatctccagctgcatgctgggagaaccactgctctcttcaaagctgtcagacagggacatttaagtctgcagaagttactgctgtctttttgtttgtctgtgccctgcccccagacgtggagcctacagaggcaggcaggcctccttgagctgtggtgggctccacccagttcgagattccaggctgctttgtttacctaatcaagcctgggcaatggtgggcacccctcccccagactcactgccaccttgcagtttgatctcagactgctgtgctagcaatcagcgagactccgtgggcataagaccctccgagccaggttcaggatataatcttgtgttgtgtcgttttttaagcccattggaaaagcacagtattcgggtgggagtgacccgattttccaggtgctgttcgtcacccctttctttgacttggaatgggaactccttgaccccttgcacttcccaagtgagacaatgcctcaccctgcttcggctcatgcacagtgcatgcacccactgacctgcgcccactgtctggcactccctagtgagatgaacctggtacctcggatggaaatgcggaaatcaccgtcttctgcatcactcatgctgggagctgtagaacagagctgctcctattcggtcatcttggctcctccccctagggttgttgaattttgtcaaaggccttttctgcaactattgatataatcatgtggtttttgtctttggttctgtttatatgctggattacatttattgatttgtgaatgttgaaccagccttgcatcccagggttgaagaccacttgatcatggtggataagctttttgatgtgctgctggatttggtttgccagtattttattgaggatttttgcatcaatgttcatcaaggatattggtctaaaatcctcttttttggttttgtctctgccaggctttgttatcagggtgatgctggcctcataaaatgagctagggagattacctctttttctattgaatggaatagtttcagaaggaatggtaccagttcctccttgtacctctggtagaattcagctgtgaatccaaaccataaaaaccctagaagaaaacctaggcattacctttcaggacataggcatgggcaaggacttcatgtctaaaacaccaaaagtaatggcaacaaaagccaaaattgacaaatggggtctaattaaactaaagagcttctgcacagcaaaagaaactatcatcagagtgaacaggcaacctacaaaatgggagaaaattttcacaacctactcatcaaacaaagggctaatatccaaaatctacagtgaactccaacaaatttacaagaaaaaaacaaacaactccatcaaaaagtgggtgaaggacatgaacagacacttctcaaaagaagacattcatgcagctaaaaaacacatgaaaaaatgctcaccatcactggccatcagagaaatgcaaatcaaaaccacagtgagataccatctcacaccagttagaatggcattcattaaaaggtcaggaaacaacaggtgctgggcaggatgtggagaaatagaacacttttacactgttggtgggattttaaactagttcaacaattatggaagtcagtgtggcaattcctcagagatctaggactagaattaccatttgacccagccatcccattactgggtatatacccaaaggactataaatcatgctggtataaagacacatgcacacttatgtttattgcatcactattcacaatagcaaatacttggaaccaacccaaatgtccaacaaggatagactggattaagaaaatgtggcacatatacaccatgaaatactatgcagccatgaaaagtgatgagttcatgtccgttataggacatggatgaaattggaaatcaacattctcagtaaactatcgcaaggacaaaaatcaaacaccgcatgttctcactcataggtgggaattgaacaatgagaacacatggacacaggaaggggaacatcacactctagggactcttgtggggtgggaggagaggggagggatagcattaggagatatacctaatgttaaatgaggagttaatgggttcagcacaccagcatggcacatgtatacatatgtaactaacctgcacattctgcacatgtaccttaaatcttaaagcataaaaataataaaaaaaaacaaaaaacaaaaagaagtttctcagaatacatctgtctaatttttatgtgaagatacttccttttccactttaagacgcaaagttctccaaatatccacatgcagatcctattaaaagagtgtgtcaaaactcctcaatcaaaagaaaagttcaaatctgtgagatgaatggacacatcagaaagaagtttctcagaatgcttctgtctaatttttacgtgaagacaactccttttccactataggccacaaagcactccaaatatccatttgcagatactacaaaaagactgtttccaaactgctgaaacaaaagaaatgctcaactctgtgacatgaatgcacatattacaaagaagtttctcagaacgattctgtctggtttttatgtgagaatatttccttttccaccataggcctcgaactcctccaaatatccagttgcagattctacaaaaagagtgtttcaaaactgctcagtcaaatgaaaggttcaactctgtgagatgaatgcacacatcacaaagaggtctctcagaatgcttctgactagcttttacatgcaaatatttatttttccactataggctgcagagctctacaaatatccatttccagtaccacaaaacgagtgtttcaaaactgctcaatcaaaagaaaggttcaactctgtgagttgaatgcacacatcacaaagaagcttctcagaatgcttctgtatagtgtttatgtgaagatatttcctgttccaccaaaggctacaaagtgctccaaatatccacttgcagattctacaaaaacaaagtttcaaaactgctcaatcaaaggaaaggttcaactctgacagataaatgctcacatcacaaagatgtttctctgaatgcttctgcctagttttatgtgaagataactcctgctccacgataggctgcaaagcgctccaaacacccacttacagattctacaaaaagagtgtttccaaactgctcaatcaaaagaaaggttcaactctgtcagatgaatgggcacatcacaaagaagtttctcagaatgcttctgtctagtttttatgtgaagatatttccttttccaacataggcctcaaagtgctgcaaatacccacttgcagatgcttcaaaaagactgtttcaaaactgctcagtcaaatgaaagtttcaactctgtgagatgaatgcaaacctcacaaagaagtctctcagaatgcttctgactagtttttacatgcagatatttatttttccactataggctgcagagcactacaaaaatccatttccagataacacaaaacgagcgtctcaatactgcttaatcaaaagaaaggttcaactctgtgagttgaatgcacacatcacaaagaagcttctcagaatgcttctgtctagtttttatgtgaagatatttccttttccccaaaggccacaaagcgctccaaatatccacttgcagattctacaaaaacagtgtttcaaaactgctcaatcaaaggaaaggttcaattctgagagataaatgttcacatcacaaagatgttcctctgaatgcttctgcctagtttttatgttaagatttctcgttttccatgatgggccgcagagtgctccaaacacccacttgcaaattctacaaaaagagtgttaccaaactgctcagtcaaaagaaagtttcaactctgtgagttgaatatacacatcacaaagtttatcagaatacttcttagtagtttttatgtgaagatatttccttttccacaataggccttgaagctctccaaatatccacttgcagattctacaaaaacagtgtttccaaactgctcaatcaaatgaaagtttcgactgtgtgagatgaatgcacacatcacaaagaagattctcagaatgcttctgtgcagtttttatgtgaagatatttccttttccacaacaggcatcaaagcgctccaaatattcacttgcagattctacgaaaagggtgtttcaaaactcctaaatcaaaataaaggtgcaactctgtgtgatgaatgcacacatcacaaagaagtttctcagaatgcttctgcgtagttcttatgtgatgatatttccttttccaccataggtcgcaaagggctccaaatatccccctgctgattttccataaagagtatttcaaaacagctcaatcaaaagaaagtttcaagtctgtgagatgaatgcacacatcacaaagaagtttctcagaatgcttctgtgcagtttttgtaaagatatttacttatccaaaagaggcctcaaagcgcttcaaatatccacttgctgattctataaaaagggtgtttcaaaactgctcaatcaaaagaaaagttcaactctgtgagatgaatgcacacatcacaaagaagtttctgagaatgtttctgtgtagtttttatgtgaatatattttcttttgcacaataggcctcaaagcgcttcaaatatccacttgcagattctataaaaagggtgtttgcaaactgctctatcaaaagaaacgttcagcactgtgaggtgaatgtgcacattacaaagacgtttctcagaatgcttctgtgtagtttttatttagataggttcaacacactgagttgaaggcacgtatcccaaagaaggttttcagaatgcttctgtgcagtttttatgtgaagatatttccttttccactataggcatcaaagcgttccgaagatccacttgcagattacacaaaaagagtgtttccaaactgctcaatgaaaagaaaatttcaactctgtgagatgaatggacacatcacaaaaaagtttgtcagaatgcttctgtgtagttttcatgtgaagctattttcttttccaccataggcctcatcatgctccaaatatccacttgcagattctaaaaaaagagtgtttcaaaactgctccatcaaaagaaatgttcaactctgtgagatgaatgcacacatcacaaagaagtttctcagaatgcgtccatgtagtttttatgtgaatatatttccttttccaccatagtccaaaaagggctcaaaatattcactttcagtttctacaaaaagagagaattaaaattgctgtttcaaaagataagtccatctctttgagatgaatacataaatcacaatatagtttctcagaatgctttggcatagtttttatgtgaagatatttccttttccaccataggtctcaaagttctccaaatatccacttgcagatactacaaaaagagtgtttcaaaactgctcaatcaaaggaaaagtgcaactcagtgaaatgaatgcacacatcaaaaagaagtttctctcaatgcttcagtgtagatttatgtgtagatatttccttttccataataggcctcaaagggctccaaatatccacatgcagatgctacaaaaagagtgtttcaaaactgctcaaactgttcatcaaagaaaggttaaactctgtgtgatgaacgcacacatcacaaagaagtttctcagaattcttcagtgtaatttttatgtgaagatatttccttttccacgataggcctgaaagagctccaaatatccacttgcagattaataaagtgtgtttccaaactactcaatcaaaagaaagattcaagcctgtgaaatgaatgcacacataacaaagaaatttctcagaatgcttctctgtagtttttatgtggagatatttccttttccgacataggccactaagggctccaaatacccacttgcagatactacaaaaagagaatttcaaaactactcatacaaaagataggttcaactctgtgagttgaatgctcccatcacaaagaagttcttcagagtgcttctgtgtagtttttatgtgaagatatttccttttccacaataggtctcaaagtactccaaatatccacttgcagattctgcaaaaagagtgtttcaaaactgcccaatcaaaagaaagtttcaactgtgtgagatgaatgcacatatcacaaggaagtttctcagaatgtttctgtgtaatttttatatgaagatatttccttttccacaacacgcttcaaagcgctccaaatatccacatgtagattctacaaaaagagtgtttcaaaactgctcaatcaaaagaaaggttaagctttgtgagatgaaggcacacaacacgaagaagtttctaagaatgcttctgtgtagtttttatttgaagatatttccttttccaccacaggcctaaaagagccacaaatatccacttgcatatcctacaaaaagactgtttccaaactgctcaatcaaaagaaacgttaaaatctatgagatgaatgcacacatggcaaagaagttggtcagaatgattctgtgtagttttaagttgaagatatttccttttccacaaaaggcctcaaaggcctcaaaatatacacctgcagattctacaaacagattttctctaactgctcaatcaagttaaaggctaaactctgtgagatgaatgaacacataacaaggaaatttctcagaatgctttgtgtagtttttatgtgaagatatttccttttcatgcacaggccacaaagctctccaaatatccaattgcagattctataaaaagagagtttcaaaactgctcattcaaaagataggttcaacactctgagttcaatgctcacatcacaaacaagtttatcagagtgcttctgtgtagttttaatgtgaagagatttccttttccaccataggcctcaaagcactccaaatatccacttgcagattctacaaaaacagtgtttacaaactactcagtcaaaagaaagtttcaacactgtgagatgaatgcacacatcacaaagaagtttctcagaatgcttctatgtagtttttatatgacggtatttccttttccacaataggcctgaaagtaatccaaatatccaattccagattctacaaaaagagtttttctgctcagtcaaaagaaaggctcaactgtgagagatgaatgcacacatcaaaaagaagtttttcagaatgcttctgcgtaatttttatgtgaagataattccttttccaccataggcctcaaagggctcccaatttccacctgcagattctacaaaaagagagattcaaaactgctgaatcaacagatatgttcaactctgtgagttgaatgcagacatgacaaagaagtttttccgaatgcttctttgtagtttttatgtgaagatatttccttttccgctatagtcctcaaagtgctccaaatatccaattgcagattctaaaaaaagggtgtttcagaactgttcaatgaaatcaaatgttcaacactgtgagatgaatgtgcacatcacaaagaagtttctcagaatgcttctgtctagtttttatgtgaagatatttccttttacaccataggcctcaaagccctcccaatatccacttgccgattctacaaaaagagtgtttcgaaactgctgaatcaatagaaagtttcaactctgtgagatgaatgcacacatcgcaaggaagtttctcagaatgcctctgtatagtttttatgtgaagatatttccttttccacaataggcctcaaagagcttcaaatatccacttgcagattctataaaaagagtgtttcaaaactgctcaatcaaaagaaaggttcacctccatgagatgattgcacacatcacaaagaagcttctcagaatgcttctgtgtagtttttatgtgaagatatttccttttgcaaaacaggctgcaaagagctcctaatatccacttgcagattctacaaaaagggagattcaaaactgctcaatcaaaagataggttcaactctgtgagttgaatgcatgcatcacatagaagtttctcagaatgcttctgtgtagttttatgtgaacatatttccctttccacagtaggcctcacagggcttcaaatatccacttccaaattctgccaaaagagtgtttaataactgctcaatcaaaagaaagtttcaactatgtgagatgaattcacacatcagaaagtagtttcttagaatgcttctgtgttttgatgtgaagatatttccttttcaaaaataggttgcaaagggctccaaatatccacttgcagatactacaaacagagagtttcaaaaccgctgtatcaaaagaaaggttcaactctgtgagttgaatgcacacatcacaaagaagtttctcagaatgcttctttgtagtttttatatgaagatatttccttttccaccgtaggcctcaaagcgcttcaaatatccacttgcagatcctacaaaaagaatgtttcaaaattgctcaatcaaaagaaagtttcaactcggtgagatgagtgcacgcatcacaaagatgtctctcagaatgcttctgtgtagtttttatgtgaagatattcccttttccacaataggcctcaaagcgcttcaaatatctacttgcagatccttccaaaagagtatttccaaactgctcaatcaaaggaaaggttcaattctatgagatgaatgcacatatcacaaagaagtttctcagaatgcttctatatactttttattcgaagatatttcctattccacagtagtcctgtaagctctccaaatatccacttgcagattgcacaaaaagagtgtttcaagactgctcaatcaaaagagaggttcaactctttcaggtgaatgcacacaacacaaagaagtttctgagaatccttctgtggactttttatttgaagatatatccttttccaccacacgccacaaagggctgaaaatatgcacttgcagattctacaaaaagagagtttcaaaactggtctatcaaaagataggttcaggtgtgtgggtggaatggacacatccaaagaactttctcagaatgcttctgtgtagtttttttgtgaagatatttccttttcaacaataggcctcaaagcgccccaagtatccagttgcagattctacaaaaagatagattaagaagtactcaatccaaacataggttcaattctgtaagatgaatgcacacatcgcaaagaagtttctcagaatgcttctgtatattgtttatgtgaagatatttccttttccacagtaggcctcaaagtgctccaaatatccacttgcagatgctacaaaaagagtgtttcaaaactgctcaatcgaaacgaaggttcaacagtgtgagatgaatgcacatcaaaaagaagtttctcagaatgcttctgtgtagttttatgtgaatatatttccctttccacaataagcctcacagggcttcaaatatccacttccagattcgataaaaagagtggttcacaactgctcaatcaaaagaaagtttcaattctgtgagatgaattcacacatcagaaagtagtttctcaaaatgcttctgtgtaatttttatgtgaagatatttccttttccaccataggctgcaaagggctccaaatatccacttgcctatactataaaaagagagtttcaaaaattctctatcaaaacaaaggttcaacacagtgagttgaatgcacacatcacaaagtagtttctcagaattcttctttgtagtttttatgtgaagatatttccttttccaccattggcttcaaagtgctccaaatatccacttgcagatgctacaaaaagagtgtttgaaaatagatcaattgaaagaaaagttcaactctgtgagatgaatgcacacatcaaaaagaagtttctcagaatgcttctgtgtagtttttatgtgaagatatttccttttccacaataggcctcaaagcacttcaaatacctactagcagattcttcaaaaagagtctttctaaactgctgcatcaaaagaaagtttcagatttttgagatgaatgcacacatcacacagaagtttctcagaatgctttcgtgtagtttttatttgaagatatttccttttcaaaaataggcagcaaagggatcaaaatatccacttgcagattctacaaaaagagaaattcaaaaccgtgccatcaaaggataggttcaactctgtgagtcaaattgacacatcacaaagtagtgtctcagaatacttctgtttagtttttatgtgaagatattcccttttccaacatagacctcaaagtgctctaaatatccaattacagattctacaaaaagagtgtttccaaactgctcaatgaaaagaaagtttcaactctgtgagatgaatgcacatatcacaaagaagtttttcagaatgcttctatatactttttatgcaaagatatttcttattccacagttgtcctctaagctctccaaatatccacttgcagactctacaaaaagagtgtttcaagactgctcaatcaaaagaaaggttcaactctattaggtgaatgcacacaacacaaagatgtttctgagaatccttctgtggactttgtatgtgaagatatttccttttccaccatatgccgcaaagggatgaaaatatgcacttgcagattctacaaaaagagagtttcaaaactggtctatcaaaagataggttcaggtgtgtgggtggaatggacacatcacaaagaactttctcagaatgcttctgtgtagtttttttctgaagatatttccttttcaacaataggcctcaaagcgccctaagtatccacttgcagattctacaaaaagatagattaaaaagggctcaatcaaaagatagattcaattctgtaagatgaatgcacacatcacaaagaagtttctcagaatgcttctgtatgttgtttatgtgaaggtatttcctgttctgcagtaggcctcaaagtgctccaaatatccacttgcagattctacaaaaagagtgtttcaaaactgctcagtcaaaagaaaaattcaattctgtgagatgaatgcacacgtcacaaagaagtttctcagaatgcttctgtgtagtttttatgtgaagatattcccttttccaccataggccacaaagggctccaaatatacacttgcagattctacacagtttcaaaactgctctatagaaagataggttcagttctgtgagttcaatgtacatataacaaagaagtttctaagagtgcttctgtgtagtttttatgtgaagatatttctttttctgctatagggctcaaagcactccaaatatccacttgcagattctacagaaagagtgtttccaaactgctcaataaaaagaaatgttcaaatatgtgagatgaatgcacacatcacaaagaagtttctcagaatgcttctgtgtggtttttatctgaagatatttccttttccacaaatggccttaaagcgttccaaatatccccttgcagattctacaaaaagagtgtttccaaactgctcaataaaatgagaggcttaactctgtgagatgaatctacacatcacaaagctgtttctcagaatgcttcttagtagtttttatttgaagatatttccttttccatcctagtccacaaagggctccaagtatccacttgaagatgctacaaaaagagagttttgaaactgctcaatcaaaagataggttcaaatctgtgagttgaatgcagacatcacaaagaagtttctcggtattcttctgtgtagtttttatgcgaagatatttctttttccacgatagtcatcaaattgcttcgaatatccacttgctgattccagaaaaagagtgtttcaaaagtgcataatcaaaagagagtttgaactctgtgagatgaatgcacagatcacaaacaagtttctcagaatgcttctgtgtactttttatgtgaagatattaccttctccaccataggcctcaaagtgctccaaatatctacttgcagattcttcaaaaagagtgtttccaaactgctgaatgaaaagaaaggttcaactctgtgagatgaatgcacacataacaaagaagattctcagaatgcttctgtgtagtttttatgtgaagttatttccttttccagcataggcctcaaaacactccaaatatccacttgcagattctacaaaaagagtgtttccaaactgctcaatcaaaatgaaggttctactctgtgagaggaacgcacccattgcaaagaagtttctcagaatgcttctgtgtagtttttatgtgaagatatttccttttccatcataggccaaaaagggctccatgtatccacttgaaggtgctataaaaagatagtttcgaaactgctccatcaaaagatatgttcaaatttctgtgttgaatgcacacatcacaaagaagtatcttggaattcttctgtgtaggttttatgtgaagatatttcctttcccaccattggcgtcaaaatgctccgaatatccacttgcagattccacaaaaagagggtttcaaaagtgcacaatcgaaagagaggttcaactctgtgagatgaatgcacacatcacaaacaagtttctcagaatgcttctgtgtactttttatgtgaagatatttccttttccaaaataggcctcaaagcgctccaaatatccatctgcaggttctacaaaaagtctgtttcaaaactgctcaatcaaaagacagtttcaactctctgaggtgaatgcacacatcacaaagaagattctcagaatgcttctgtgtagtttttatgtgaaaatttttccttttccatcataggccacaaagcgctccaaatatccacttgcagattctacaaaaagagtgtttcaaaactgctcaatcaaaggagaggttgaactctgtgagatgaatgcacacatcacaaagaagtttctcagaatgcttctgtgtagtttttctatgaagatattcctttttccaccataggcttcaaagggctccaaatatccacttgaagattttacaaaaagagagtttcaaaactgctctatcaaaaggtaggttcaactctgtgaattgaatgcatacatcacaaagtagttcctcagaatgcttctgggtagtttctatgtgaagatatttccttttccaccataggcctcaaagagctccatatatccacttgcagattctacaaaaagagtgtttccagactgctcaataaaatgaaaggctcaactctgtgagatgaattcacacatcacaaagaaatttgtcagaatgtttctgtgtcgtttttatgtgaagatatttcctttttcatcgtaggccacaaatggctccatgtgtccatttgaagatgctacaaaaagagagttttgaaactgctggatcaaaagataagttcaaatttgtgagttggatgcacacatcacaatgaagtatctcggaattcttctgtgcaggttttttgtgacgctatatccttttccaccataggcgtcaaattgctccgaatatccacttgcagattccacaaaaagagggtttcaaaagtgcacaatcaaaacagaggttcaactctgtgagatgaatgcacacatcacaaacaagtttctcagaatacttctgtgtactttttatgtgaagatatttccttttccaaaacaggactcaaagtgctccaaatatccacctgcaggttctacaaaaagtctgtttcaaacctgctcaaccaaaggcggttcaactctctgagatgaatgcacacatcacaaagaagtttctcagaatgcttctgtgtagtttttgtgtgaagatatttccttttccactctgggcatcaaagggcttcaaatatccacttgcagatcctatcaaaagagtgtttcaaaactgctcaatcaaaagaaagtttaaactctgtgagatgaatgcacacatcacaaaggagtttctcagagtgcttctgtttattttttatgtgaagatatttccttttccacaatagaccttgatgcgatctgaatatccactttcaaattctacaagaagggtgtttcaaaactgctcaatcaaataaaagtttcagctctatgagatgaatgcacacatcacaaggaagttcctcagaatgcttctgtgtagtttttttgtgaagatatttccttttcaaaaatagaccacaaagggctcaaaatatccggttctatattctgcagaaacagaaatacaaaactgttcaatcaaacgacaggttcaactctgtgagttgagtgcacacatcacacagaagtttctcagagtgcttctgtgtagttttcatgtgaagatatttcctcttccaccataggcttcaaagcgctccaaatatacacttgcagattctacaaaaagagtgtttccaaactgctcaatcaagagaaaggttcaactctgtgagatgagtgcacacatcacaaagaagttgtcagaatgcttctgtgtagtttttatgtgaagatatttccttttccacaataggccccaaagtgctgtaaatatccccttgcagattctacaaaaagagtgttacaaaactgctcaataaaatgaaagactcaactctgtgagatgaattcacacatcacaaagaagtttctcagaatgcttctgtgtagtttttatgtgaagatatttccttttccatcataggccacaaagggctccatgtatccacttgaagatgctacaaaaatagagttttgaaactgcttgatcaaaagataggttcaaatttgcgagttgaatgcacacatcacaatgaagtatctcggaattcttctgtgtagtttttttgtgaagatatttccttttccatcataggcttcgaagcgctccaaatatccacttgcagattccacaaaaagagggtttcaaaagtgcacaatcaaaagagaggttcaattccgtgagatgaatgcacacatcacaaacaagtttcttagaatgtttctgcatactttttatgtgaagatatttccttctccaccataggcctcaaagggctccaattatccacttgcagattcttcaaaaactgtgatgtgaatgcacacatcacaaagaagattctgagaaagtttctgtgtagtttttatgtgaagatatttccttttccaccataggcttcaaagcactccaaatatccacttgcagattctacaaaaagagagtttcaaaacttctctatcaaagtagagactcaacgcagtgagttgaatgcacacattacacagaagtttctcagaatgcttctgtgcagtttttatgtgaatatatttccttttccaccagaggcctgaaagtgcttcaaatatctaatttgcagtttctacaaaaagagtttttcaaaactgctcaatcaaaagaaagtttcaactctttcagatgaatgcacagatcacaaagaagtttctcagaatgcttctgtgtagtttttatgtgaagatatttccttttccaccataggcctcaaagcgctccaaatatctatttgcagattctacaaaaagagtgtttccaaactgctcaatccaaagaaaactccaactctctgagatgaatgcacacatcacaaagaagtttctgagaacacttctgcgtaattttaatgtgaagatattccctttccacaataggcctcaaagtgcttcaaatatccacttgcagattttataaagtgtgtttcaaaactgctcaagcaaaagaagggttcaacactatgagatgaatgcacacatcacaaagaagtttctgagaaagctgctgtatagtttttttgtgaagatatttccttttccaaaataggccacaagtggctccaaatgtccacttgcagattctaccaaaagagagatgcaaaactgttctatcaaaaggacagttcaactctccgagttgagtgcacacatcacaaagtagtttctgggaatgcttctatctcgttttatatgaagatattcccgtttccactgtaggccacatagtgctcaaaatatccacttgcagattctataaaaagagtgtttcaaaactgcactatcaaaaggagcgttcaactctgtgagttgaatgcaaacatcacaaagaagtttctgagaatacttctttctagtttctatgtgaaaatatttgtgttcccactgatgccttccttgcgatcaaatatccacctgcagatattacaaaatgagtgtttcaaaactgctctatcaaaaggatggttcaactctctgagttgaatgcacacatcacaaagaagtttctgagaatgcttctgtctagtttttatgtgaagatattcccgtttccaccgtaggcctcaaagagcttaaattatccacttgtagattgtacaaaaagagtgtttcaaaactgctctatcaaaagaaagttcaacactgtgagttgaatgaacacatcccaaagaagtttctgagaatgcctctgtctaatttttatgtgaagatattctcgtttccaccgaaggcctcaaagcggtccaaatatccacttgcagattctacaaaaagagtgtttcaaaactgctcaatcaaaaggattgttcaactctgtgagttaaacccaaacatcacaacatagtttctgagaatgcttctgtgtagtttttatatgaatatatttccttttgtaccataggcctcaaagcactccaaatatccagttgcagattctacaaaaagtgtgtttcaaaactgctctaaaaaaatggaggttaaactctctgaattgaatgcacacatcacaaagaagtttctgataatgcttctgtctagtttttatgtgaagatataccggtttccactgtaggcctaaaagcactccaaatatccacttgcagattctacaaaaagaggcattcaaaactgatctatcaaaaggaaggttcaactctctgagttgaaagcacacatcacaagaagttactgagaatgcttctatctagtttctatgggacgatatttccttttccagcacacgccacaaagcgctccaaatgtccacttgcatattctacaaaaagagtgtttcaagactgctctatcaaaaggaaggttcaactccatgagttgaattcacacgtcacaaagaagtttcagagaatgcttctgtctagtttttatgtgaagatattcccatttccaccataggcctcaaagcgctccaaatatccagttgaaccttctacaaaaagagtgtttcaaaactgctctatcaaaagcaatgctcaagtctgtgagttgaatgcacacatcacaaagaagtttctgagaatgcttctgtctagtttttatgtgaagatatttccctttccaccacaggcctcaaagcgctgcaaacgtccacttgcagattctacaaaaagagtgtttcaaaactgctctatcaaaagaaaggttctactctttgagttgaatgcacacgtcacaatgaagtttctgagaatgcttctgtctaatttttaggtgaggattttcccatttccaacaaaggcctcaaagcgctccaaatgtccacttgcagattctataaaaagagtgtttcaaaagtgctttatgaaaaggaatattcaactctgtgagttgaatgcccacatcaaaatgaagtttctgagaatgcttctgtctagtttttaagtggagatattcgtctttccaccgaaggcctaaaagcgctccgtatatccatctacagattctacaaagagagtgtttcaaaactgctctatcaaaagaaaggttcaactctgggatttgaatgcacacatcacaaagtagtttctgagaatgcttctgtgtagtttttatataaaggtatttccttttctaccataggcatcaaagcactccatatatccacttgcagattctacaacaagatttttcaaagctgctctgccaaaaggaaggtttaactccctgagttgaatgcaagcatcacaaattactttctgaaaatgcttctgtctagtttttctgtgaagatattcccgtttccacgtaggcctcaaaatctccaaatatatacttgcagattctacaaaaagcctctgtcaaaactgctgtatcaaaaggaaggttcaactctcccaggtgaatggacaaatcacaaataagtttctgagaatgcttctgtctagttttcttgtgaagatattactgtttccaccgtaggcctcaaatcgctccaaatatcaaactgcagattccacaaaacgagtgtctcaaaactgcactatgaaaacgaaggttcaaatctgtgagttgaatgcacacatccgaaagaagtttctgagaatgcttccttctagtttttatgtgaagatattccctattacccctaaggcctaaaagcggtccaaatatcctcttgcagattctacaaaaagagtgtttcaaaactgctctatgaaaaggaatgttcagctctgtgagttcaatgcaaacatcacaaagaagtttctgagaatgcttctgtctagtttttgtttgcagacatttccttttccaccatagacctcaaactgctccaaatattcacttgcagattctaaaatagagtgtttcaaaactgctctaagaaaaggaaatttcaactctgtgagttgaatgcacacatcacaaagaagatactgagattgcctctgtccagtttacatgtgaagatatacccctttccaccaaaggcctaaaagcactccaaatatccacttgcagattctacaaaaagagtgtttcaaaactgatctatcaaaaggaagtgttatcttcatgaggtcaatgcacatcacaatatagtttctgataatgcttctgtataatttttatatgaagatatgtccttttccaacataggcctcaaagggctcaaaatatccacttgcagattctatgaaaagagtgattcaaaactgctctatgaaaaggaaggttgaactccgtgagttgaatgcacccatcacaaagaaggttctcagaatgaagatattacgtgaagatattcttgtttccaccgaaggcctcaaagtgctccaaatatccacttgccgatcctacaaaaagagtgtttcaaaactgctctatcaaaagaaaagttcaactcttttagttgaatgcacacttcacaaagaagtttctgagaatgcttctgtctactctttaggtgaagaaacttccttttccatcatagaccttaaagcgctcaaatatccacttgcagattcttcaaaaagagtgtttcaaaactgctgtatgaaaagggaggtccaattctgtgagttgaatgcacacatcacaaagaagtttctaggatacttctgtcaagattttatgtgaagatattcccgtttccaacataggcctcaaagagctccaaatatccacttgcagattctacaaaaatagtgtttcaaaactgctctatcaaaagaaaggttcacctctgtttgttgaacgaacacataacaaagaaatttctgagaatccatctgtctactttttatgtgaagacacttccttttccaccatagacctcaaagcgctccaaatatccaattccagattctacaaaaagagtgtttcaaaactactctatcaaaacgaaggttaaactctgtgagttgaatgcacacatcacaaagaagtttctgagaatgcttcggtctgatttttatgtgaagttatttcccttttcaccacaggcatcaaagtgctcaaaatgtccaattgcagattctacaaaaagagtttttcaaaacttgtctatgaaaagaaaggttcaactctgtaggttggatgcacacatcacaaagtagtttctgagaatgcttctgtctagtttttaatatgaagacatttccttttctaccttaggcctcaaagcgctccaaatatccacttgcagattccacaaaaagagtgtttcaaaactgatctatgaaaaggaagtttctactctgtgaattgaatgcgcacaacacaaagaagtttccgagactgtttctgtctagtttttatatgaagatattccagtttccagagaaggcctcaaagagttccatatatccacttgcagattctacaaaaagagtgtttcaaaactgctctgtgaaaaggaatgttcagcactgtgagtggaatggaaacatcacaaagaagtttctgagaatgctgctgtctagtttttatgtgaaaatattcccgtttccaccaaaggcctcaaagcggtccaaatatccacttacagattctacgaagagtgtttcaaaactgctctatgaaaaggtatgttcaactctgtgagtagaatgcaaacatcacaaagagatttctgagaatgcttctgtctggtttttatgtgaagatattcccgtttccagtgaaggcctcaaagccgtccaaatatccacctgcagatactatgaaaagagtgtttcaaaactgctctatgaaaaggtatgttcaactctgtgagtagaatgcaaacatcacaaagagatttctgagaatgcttctgtctagtttttatgtgaagatattcccgtttccaatgaaggcctcaaagccatccaaatatccacctgcagatactatgaaaagagtgtttcaaaactgctctatgaaaaggtatgttcaactctgtgagttgaatgcaaacatcacagagaagtttctgagaatgcttctgtctagtttttttttttttttggaatgataaacattttaatttgaaaagcaggcatctctgctgttaagctttcttttgatgggtggggagtggggggcgttggagtttatttatttttgttattattatacttcaagttttagtgtacatgttcacaatgtgcaggttagttacgtatgtatacatgtgccatgctggtgtgctgcacccactaactcgtcctctagcattaggtatatctcccaatgccatccttctcccctccccccaccccacaacagtccccagagtgtgatgttccacttcctgtgtccatgtgatctcattgttcaattcccacctatgagtgagaatatgcggtgtttggtttcttttcttgcgatagtttactgagaatgatgatttccaatttcatccatgtccctacaaacgacatgaactcatcatttttatggttgcatagtattccatggtgtatgtgtgccacattttcttaatccagtctatcattgttggacatttgtgttggttccaagtctttgctattgtgaatagtgccacaataaacatacatgtgcatgtttctttatagcagcatgatttatagtcctttgggtatatacccagtaattggatggctgggtcaaatggtatttctagtcctagatccctgaggaatccccacacggagttccacaatggatgaactagtttacagtcccaccaacagtgtaaaagtgttcctatttctccacatcctctccagcacctgttgtttcttgactttttaatgattgccattgtaactggtgtgagatggtatctcattgcggttttgatttgcatttctctgatggccagtgagggtgagcattttttcatgtgttttttggcagcataaatgtcttcttttgagaagtgtcagttcatgtcctttgcccactttttgatggggttgtttgtttttttcttgtaaatttgtttgagttcattgtagattctggatattagctctttgtcagatgagtaggttgtgaaaattttctcccattttgtagtttgcctgttcattctgatggtaatttcttttgcagtgcagaagctctttagtttagttagatcccatttgtcaattttggcttttattggcactgcttttggtgttttagacatgaagtccttgaccatgcctatgtcctgaatggtaatgcctaggatttcttctagggttttcatggttttacatctaatgtttaagtctttaatccatcttgaattgatttttgtataaggtataaggaagggatccagtttcagctttctacataaggctagccagttttcccagcaccatttgttaaatagggaatcctttccctattgcttgttcttctcaggtttgtcaaagatcagatagttgtagatatgtggcgttatttctgagggctctgttctgttccattgatctatatctctgttttggtaccagtaccatgctgttttggttactgtagccttgcagtatagtttgaagtcaggtagtgtgatgcctccagctttgttctttaggcctaggattgtcttggtgatgcgggctattttttgattcctatgaactttaaagtagtttttcctattctatgaagaaagtgattggtagcttgatggggttggcattgaatctgtaaattaccttgggcagtatggccatttccacgatattgattcttcctacccatgagcatggaatgttcttccatttgtttgtatcctattttatttccttgagcagtggtttgtagttctccttgaagaggtctttcacgtcccttgtaagttggattcctaggtattttattctcttggaaacaactgtgaatgggagttaagtcatgatttggctctctgtttgtctgttgttggtgtataagaatgcttgtggtttttgcacattgattttgtatcctgagactttgctgaagttgcttatcagcttaaggagattttcggctgagacaatggggttttctagatatacaatcatgtcatctgcaaactgggacaatttgacttcctctttatctaattgaataccctttatttcattctcctgcttaatcgccctggccagaacttccaacactatgttgaataggagtggtgagagagggcatccctctcttgtgccagttttcaaagggaatgcttccagtttttgcccattcagtatgatattgtctgtgggtttgtcatagatagctcttattattttgaaatgcatcccatcaatacctaatttattgagagtttttagcatgaaggattgttgaattttgtcaaatgccttttctgcgtctattgagataatcatgagtttttttctttggttctgtttatatgctggattacatttattgatttgcatatattgaaccagccttgcatcccagggatgatcccagcccacttgatcatggtggataagctttttgatgtgctgctggattcggtttgccagtattttattgaggatttttgcatcaatgttcatcaaggatattggtctaaaattctcttttttgattgtgtctgcccggctttggaatcagaatgatgctggcctcataaaatgagttagggaggattccctcgttttctattgattggaatagtttcagaaggaatggtaccagctcctccttgtacctttggtagaattcggctgtgaatccgtctggtcctggactctttttggttggtaagctattgattattgccacaatttcagatcctgttattggtctattcagagattcaacttcttcctggtttagtcttgggagagtgtatgtgtcgaggaatttatccatttcatctagattttccagtttatttgcatagaggtgtgtgtagtattctctgatggtagtttgtatttctgtggaatcggtggtgatatcccctttatcattttttattgcatctatttgattcttctctctttttttctttttagtcttgctagtggtgtatcaattttgttgacccttcaaaaaaccagctcctggatccattaattttttgaagggttttttgtgtctccatttccttcagttctgctctgattttagttatttcttgccttctgctagattttgaatgtgttttctcttgcttttttagttcttttaattgtgatgttagggtgtcaattttggatctttcctgctttctcttgtgggcatttagtgctgtaaatttccctctacccactgctttgaatgagtcccagagattctggtatgttgtgtctttgttctcgttggtttcaaggaacatgtttctttctgccttcatttcgttatgtacccagtagtcactcaggagcaggttgctcagtttccatgtagttgagtggtttgagtgagattcttaatcctgagttctagtttgattgcactgtggtctgagagagagtttgttataatttctgttcttttacatttgctgaggagagctttacttccaagtatgtggtacattttgaaataggtgtggtgtggtgctgaaaaaaatgtatattctgttgatatggggtggaaagttctgtagatgtctattaagtccgcttggtgcagagctgagttcaattcctggatatccttgttgactttctgtctagttgatctgtctaatgttgacagtggggtgttaaagtctcccatttttaatgtgtgggagtctaagtctctttgtaggtcactcaggacttgctttatgaatctgggtgctcctgtattgggtgcatatatatttaggataattagctcttcttgttgaattgatccctttaccattatgtaatggccttctttgtctctttttatctttgttggtttaaagtctgttttatcagagactagcattgcaacccctgccttttttgttttccattttcttggtagatcttcctccatcctttcattttgagcctatgtgtgtctctgcacgtgagatgggtttcctgaatgcagcacactgatgggtcttgattctttatccaatatgccagtctgtcttttaattgcagcatttagttcatttacatttaaagttaatattgttgtgtgtgaatctgatcctgtcattatgatgttagctagttatcttgctcgttaattgatgcagtttcttcctagtctcaatggtctttacattttggcatgattttgcagtggctggtactggttgttcctttccatgtttagtgcttccttcaggagcttttttagggcaggcctggtggtgacaaaatctctcagcatttgcttttctgtgaagtattttatttatccttcacttaggaagcttagtttggctggatatgaaattctgggttgaaaattcttttctttaagaatgttgaatattggcccccactctcttctggcttgtggggtttctgccaagagatccactgttagtctgatgggcctccctttgagggtaacccaacctttctctctggctgcccttaacattttttccttcatttcaactttgcggaatctgacaattatgtgtcttggagttgctcttctcgagtatctttgtggtgttctctgtatttcctgaatctgaatgttggcctgccttgttagattggggaagttctcctggataatatcctgcagagtgttccaacttggttccattctccccatcattttcagatacaccaaacagatgtagatttggtcttttcacatagtcccgtatttcctggaggatttgctcatttctttttattcttttttctctaaacttcccttctcacttcatttcattcatttcatcttccatcgctgataccctttcttccagttgattccattgtctcctgaggcttctgcattcttcacgtagttctcgggccttggtaatcagctccatgagctcccttaagcacttctctgtattggttattctagttatacattcttctaaatttttttcaaagttttcaacttctttgcctttggtttgaatgtcctcccatagcttggagtaatttgatcgtctgaaggcttcttctctcagcttgtgaaagtcattctccatccagctttgttccattgctggtgaggaactgcattcctttggaggaggagaggtgctctgctttttagagtttccagtttttctgctctttttttcccccatctttgtggttttatctacttttgatcattgaggatggtgaagtacagatgggtttttggtgtggatgtcctttctgtttgttagttttccttctaacagacagggccctcagctgcaggtctgttggcgtacctggtcgtgtgaggtgtcagtctgcccctgctggggggtgccacccagttaggaggctcgtgtgtcaggggtcagggacccacttgaggaggcagtctgcccgttctcagatttccagctgcgtgctgggagaaccactgctctcttcaaagctgtcagacagggacatttaagtctgcagaggttactgctgtctttttgtttgtctgtgccctgtccccagaggtggagcctacagaggcaggcaggcctccttgagctgcggtgggctccaccctcttcgagcttcccggctgctttgtttacctaagcaagcctgggcaatggggggcgcccttcccccagcctcgctgccgccttgcagtttgatctcagactactgtgctagcaatcagtgagatccgtgggggtaggaccctccgagccaggtgcgggatacaatctcctggtgcatggttttttaagcccgtcagaaaagcgcagtattagggtgggagtgacccgattttccaagtgccgtctgtcacacatttctttgactaggaaaggtaactccctgaccccttgtacttcccgaatgaggcaatgcctcgccctgattcggctcacacagggtgcatgcacccactgacctgcgcccactgtctggcactccctagtgagatgaacacagtacctcagatgaaaatgcacaaataacctgacttctgcatcattcatgctgggagcagtacactggagctattcctatttggcaaacttggctcctccccccaggtgcttctgacaagtatttatgggaagatattcccatttccaacgaaggcctcaaagcagtccaaatgtcaacttgcagattctaccaaaaatgtgtttcaatactgggctataaaaagataagttcaacttcatgagttcaatgaaaacatcacaaagaagtttctgagaatgcttttgtctagtttttaagtgaagatatatcatttccaccataggcctcaaagctctccaaatgtccagttgcagattccacaaaaagagtgtttcaaaacggctctatcaaaagaaaggttcagctctgtgagttgaatgcacacatcacaaagacgtttctgagaatgcttctatctagtttttatgtgaagatattcccgtttccaatgaaggcctcaaagcagtaaaaatatccatatgcagatagtacgaaaagagtgtttcaaaactgctctatgaaaaggtatgttgaactctgtgagttgaatgcaaacataacaaagaagtttctgagaatgcttctgtctggtttttatgtgaagatatttccttttccaccataggcctcaaaggtctccaaatgtcgacttgcagattctacaaagagagtgtttcaaactgctctatcaaaagaaatgttcaactcagtgagttgaatggacacatcacaaagaagtttctgagaatgcttctgtctactttttatgtgaagatattccaatttccaaggaaggcctaaaagcagtccaaatatcgaattgcagagtctatgaaaaaagtgtttcaaaactgttccattaaaatatgttcaactgtgtgagttgaatgcaaatatcagaaagcagtttctgagaatgcttctgtctggtttttatgtgaagatattccttgttcacgataggcctcaaaactttccaaatgtccacatgcagattctacaaaaagagtgtttctaaactgctctatgaagagaaaggttcaactctgtgagttgaatgcacacatcagaaagaagtttctgagaatgcttctgtctagtttttatgtgaagatattcccgtttccaacgaaggcctcaaagcagtcaaaatagccactggcagattttacgaaaagagtgtttcaaaactgctctataaaaaggtatgttcaactctgtgagttgaatgcaaacatcccaaagaagtttctgagaatgcttcggtccggtttttatgtgaagatatttccttttccaccataggcctgaaagctttccaaatgttcacttgcagattctacaaaaagagtgtttcaaaacggctgtatcaaaataaaggttccaccctgtgagttgaatgcacacatcacaaataagtttctgagaatgcttctgtctagtttttatgtgaagatattcccgtttccaaagaaggcttcaaagcagtcgaaatatctacttgcatattctacgaaaagagggtttcaaaactgctctaagaaaaggtatgttcaactctctgagttgaatgcaaacaccacaaataagtttctgggaatgcttctgtctactttttatgtgaagatacttccttttcctccatagggctcaaagctctccaaatatccacttgcagattctacaaaatgactgtttcaaaactgctctatcagaagaaaggttcaacactgcgagttgaatgcacacatcaaaaagaagtttctgaggatgattctgtctagtttttatgtgaagatattcctgattccaaggaaggcctcaaatcagtacaaatatccacttgcagattctacgaaaagtgtttcaaaactgctccatgaaaaggtgtgttcaactctgtgagttgaatgcaaacatcagaaagaagtttctgagaatgcctctgtctggttttcatgtgaagatattccttttccaccataggcctctaagctctcccaatgttcacttgcaaattttatgaaaagtgtgtttcaaaactgatctaagaaaagatatgttcaactttgtgtgttgaatgcaagcatcacaaagaagtttcagagaatgcttctgtctattttttatgtgaagatatttccttttccaccataggcctcaaagatctgaaatgtccacttgaacattcttcaaaaagagtgtttccaaactgctctatcaaaagaaaggttcaactgagtcaggtgaatgcccgcatcatgaaggagtttctgagaattcttctgtctgatttttatgtgaagatattcccatttccaatgaaggccttcaaagtagtccaaatatccacttgcagattctacgaaaagagtgtttcgaaactgctctataaacaggtatgttcaactctgtgagttggatgcaagcatcacaaaaaactttctgagaatgcttctgtctagtttttatgtgaagatatttccttttccaccataggcctcaaagctctccaactgtccacttgcagattctaccaaagagtgtatcaaaacaggctctatcaaaacaaaggttgaactctgatagttgaatgcacacatcagaaagaagtttatgagaatgcttctatcttctttttatgtgaagatattcttgtttccaacgaaggcctcaaacagtccaaatatccacttgcagattctacgaaaagagtgtttcaaaactgctctataaaaaagctatgttcaactctgtgagttgctttcaaacatcacaaagaagtttctgagaatgcttctctccagtgtttatgtgaagataattccttttccaacatgggcctcaaagttctcaaaatgtccacttgcagattctaaaaagagagtgtttcaaaactgctctatcaaagaaaggttcaactctgtgagttgaatgtacacatcacaaagaattttctgagaatgcttctgtctactttctatatgaaaatattcccttttccaatgaaggcctcaaagcagtcctaatttcctcttgcagattctacgaaaagagtgtttcaaaaccgctctaagaaaaggtatgttcaaaactgtgagttgaatgcaaacatcataaagaagtttctgagaatacttctgtctaaattttatgtgaaggtatttccttttccaccatgggcctcaacgctctccgaatgtcggcttgcagattctacaaaaagtgtttcaaaactgctctatcaaaataaagattcaactctgtgagttgaatgcacacatcaaaaagaggtttctgagaatacttctgtttagtttttatgtgaagatattcatgtttccaaagtaggcctcaaagcgctccaaatatccacttgtagattctatgaaaagaatgtttcaagagttctctatgaaaaaggcttgttcaactctgtgagttgaatgtaaacatcacaaataagtttctgagaatgcttctgtccagtttttatgtgaagatatttctttttacaccatagccctcaaagctctccaaatgtcgacttgcagattctacaaaaatagtgtttcaaactgctctatcaaaagaaaagttcaactctgtcagttgaatggaaacatcaaaaataagtttctgagaatgcttctgtctagcttttatgtgaagatatgcccgtttccaaggaagggttcaaatcagtacaaatatcctcttgcagattctatgaacagagtgtttcaaaactgctccatgaaaaggtatgttcaacacggtgagttgaatgcaaacatcacaaagatgtttctgagagggggccgggcgcggtggctcacgcctgtaatcccagcactttgggaggccgaggcgggtggatcatgaggtcaggagatcgagaccatcctggctaacaaggtgaaaccccgtctctactaaaaatacaaaaaattagccgggcgcggtggcgggcgcctgtagtcccagctactcgggaggctgaggcaggagaatggcgtgaacccgggaagcggagcttgcagtgagccgagattgcgccactgcagtccgcagtccgacctgggcgacagagcgagactccgtctcaaaaaaaaaaaaaaaaaaaaagatgtttctgagaatgcttctgtctggtttttatgtgaagatattccttttccaccataggcctcaaagctctctaaatgttcatttgcagttcctacaaaaagagtgtttcaaaactactctatgaacaggtatattcaactctttgacttgaatgcagacatcacaaagacgtttgtgagaatgcttctgtctagtttttatgtgaagatatttccttttgcaacattggactcaaagctctcccaatgtccacttgcagattttgcgaaaagtgtgttttaaaactgctctaagaaaaggtgtgttcacctctgtgagttgaatgcaaacatcacaaagaagtttctgagaattcttcggtctagtatttttgtgaagatattcccgtttgcaacgaaggcatcaaagaagtacaaatatccacctgtagattctacgaaaagagtgtttcaaaactgctctatcaagaggtatgttcaactctttgagttgaatgcaaacatcacaaagaagtttctgagaatgcttctgttgaggttttatgtgaagatatctccctttcatccataggcctcaaatctctccaaatgtccacttgcaaattctacaaaaaaagtgtttcaaaactgctctatcaaaagaagggttcaactctgtgagttgaatgcacacatcacaaagaagtttctgagaatgcttctgtctagcttttatgtgaaaatattcccatttccaatgaaggcctcatagcagtcaaaatatccacttgcagattctacgaaaagagtgtttcaaaactgctctatgaaaaggtatgctcaactctgtgagttgaatacaaacattacaaagaagtttatgagaatgcctctgtctagtttttatgtgaaggtatttccttttcaaccataggacacaaagaacccaaatgtccacttgcagatactacaaataaagtgtttcaaaactgctctatcaaaacaaaggttcaactctgtgagttgaatgcacacatcacgaagtagtttctgagaatgtttctgtctaatttttatgttaaaatatttccttttctaccataggcctaaaagcgcaccaaatatccacttgcagattctacaaaaacagtgtttcaaaactgatctatgaacagttatgttcaaatctgtgagttgaatcctaacatcacaaagaagtttctgagaattcttttgtctactttttaggtgaagatatttctttttccaccgtaggcctcaaagctctccaaatgtccaattgcagattctacgaaaagagagtttcaaaactgctccatgaaaagctatgtttaattctgtgagttgaatgcaaacatcacaaagaagtttctgagaatgcttctgtctggtttttatgtgaagataatttcttttccaccggaggcctcaaagctctccaaatgtccacttgcagattctacaaaaagagtgattcaaaactgctctatgaatagaaaggtgtacgtctgtgagttgaatgcacacaccacttagaagtttctgagaatacttctgtctagttttattgtgaccatattcccgtttccaacgaaggcctcaaagcagtccaaatatccacttgcagattctacgaaagagtttttcaaaactgctctataaacaggtatgttcaactctgtgagttgaatacaaacatggcaaagacgtttctgagaatgcttctgactagttttttttgtgaagatatttcttttccaccgtaggcctcaaaggtctcaaaatgtccacttgcagattcttcaaaaagagtgtctcaaaactgctctatcaaaagaaagcttaaagactgtgagttgaatgcacacatcacaagatgtttctgagaatgcttctgtctagtttttatgggaagatattcccatttccaatgagtgccttaaagcagtcaaaatatccacttgcagattctacgaaaagagtgtttcaaaactgctctatgaaaaggtatgttcaactctgtgagttgcatgcaaacatcacaaagaagtttctgagaacgcttccgtctggtttttatgtgaaataattcctttaccaccatagacctcaaagctctccaaatgtcaacttgcagattctacaaaaagagtgtttcaaaacagctctatcaaaagtaaggtgtaagtctgtgagttgaatgcacacaccacaaaaatgtttctgagaatgcttctgtctattttttatgtgaagatattcccgtttccaatgaagacctcaaagcagtccaaatattcacttgcagattctacgaaggagtgtttcaaaacagctctatgaaaagctatgttcaactctgtgagttgaatgcaaacatcacaaagaagtttctgagaatgctttggacgagttttcttgtgaagatatttccttttccaccgtaggcctaaaagcactccaaatctccacttgcagattcttcgaaaagagtgtttaaaaactgctctatgaagagctatgttcaacactgtgacttgaatgcaaacatcacaaagaagtttcggagaatccgtctgtctagtttttatgtgaatatatatccttttgtaccataggcctcaaagctctccaaatgtccacttgcagattcgacaaaaagagtgtttcaaaactgctctatcaaaagaaagtttcaagtgtgtgagttgaatgcacacatcccaaggaagtttctgagaatgcttctgtctagcttttatgggaagatattcccatttccaacgaaggcctcaaaggaggccacatatccacttgcagattctatgaaaacagagtttcatatctgatatatgaaaaggtatgctcaactctgtgagttcaatgcaaacatcacaagaagtttctgagaatgcttatgtctgttttttatgtgaagatatttccttttccaacataggcctaaaagctttccaaatgtccacttgcagattttacaaagagagtgtttcaaaactgctccaggaaaagaaaggtttcactctgtgagttaaatgtacacatcacaaagaagtttctgagaacgattctgtctagtttttatgtgaagatattcccgtttccaacgaaggcctcaaagcagtccaaatatccatttgcagattctaccaaaaaagagcatatcaaaactgttctatgaaaaggtattttcaactccgtgcattgaatgcaaacatcacaaagaagtttttgggaattcttctgtctggactttatgtgaaggtatttccttttccaccatagcaatcaaactttccaaatgtctacttgcagattcttcgataagagggtctcaaaactgctctctgaaaaggtatgttgaactctatgtgttgaatgcaaacatcacagagaagtttctgagaatgcttctctgtagtttttatgtgaagatatttcgttttccaccataggcctcaaagctccccaaatgtccacttgcagattcttcaaaaagtgtgtttcaaaactgctctatcaaaagaaaggttcaactctgtgagttgcacgcacacatcacgatgaagtttctgaaaatgtttctctctagtatttatgtgaagaaatttccttttccaccataggcctcaaatctctccgaatgtccacttgcagattcgacaaaagagagtttcaaagctactctatcgaaagaaaggttcaggtctgtgagttgaatgcacacatcacaatgaagtttctggtaatgcttctgtctagttttaatgggaagatattcccatttccaacgaaggcctcaaagcattccaaatatctacttgcagattctacgaaaagagtgtttcaaaactgatctattcaaaggtatgttcaactctgtgagttgaatgcaaacatcacaaagaagattctgaaaatgcttctgtctgctttttatgtaaagatatttcctttcccaccataagcctaatagctttccaaatgtccacttgcagattttacaaaagagtgtttcaaaactgcactatgaaaagaaaggttcaattctgtgagttgaaagcacacatcacagagaagtttctgggaaagattctgtctaatttttatgtgaagatattcccgtttccaacgaaggcctcaaagcagtccaaatgtccactggcagattctatgaaaaaagtgtttcaaaactgcttttagaaaaggtatgttcaactccttgagttgaatgcaaacatcacaaagtagattctgagaatgcttctgtctggtttttatgttaagatatttccttttccaccataggcctcaaagctctccaaatgttcacttgcagattcttcaaaaagagtgtttcaaaactgctctatcaaaagaaaggttcaagtctgtgagttcaatgcacacatcacgaagtagtttctgagaatgcttctgtctagtttttatgtgaggatattcccatttccaatgacggcctcaaagcagtccaaatatctacttgcatattttaggaaaagattgtttcagaactcctctatgcacaggtatgttcaaccctgtgagttgaatgcaaacatcactaagtagtttctgagaatgcttctgactggtttttatgtgaagatattttcttttccaccattggccttaaagctctcctaatgtccacttccagattctacaaaaatcgtgtttcaaaactgtcgtatcaaaagaaaggttcagctctgtgagttgaatgcacacatcaaatagaagtttctgagaatgcttttgtctaatttttatgtgaagatattcccgtttccatcgaaggcctcaaagcagtccaaatatcctcttgcagattctacgaaaagagtgcttcaaagctgctctaagaaacgttatggggaggaggagccaagatggccgaataggaacagctccgttctacagctcccagcgtgagcgacgcagaagatggttgatttctgaatttccctccgaggtacgtgttcatcgcactaggaagtgccagtcagtgcacgcaggtctgtgggtgcacgcaccgtgcgtgaaccgatgcaaggtgaggcattgcctcactcgggaagtgtaaggtgtcagggagttccctttcctagtcaaagaaagagatgacagacagcacctggaaaatcgggtcactcccaccataatactgcacttttctgacgggcttaaaaaaccatgcaccaggagattgtatcccgcacctggctcggagggtcctacccccacggatctcactgattgctagcacagtagtctgagatcaaactgcaaggtggcagcgaggctgggggaagggcgccccccattgcccaggcttgcttaggtaaacaaagcagccgggaagctcgaagagggtggagcccaccgcagctcaaggaggcctgcctgcctctgtaggctccacctctgggggcagggcacagacaaacaaaaagacagcagtaacctctgcagacttaaatgtccctgtctgacagctttgaagagagcagtggttctcccagcttgcagctggaaatctgagaacgggcagactgcctcctcaagtgggtccctgacccctgacacacgagcctcctaactgggtggcaccccccagcaggggcagactgacacctcacacgaccaggtacgccaacagacctgcagctgagggccctgtctgttagaaggaaaactaacaaacagaaaggacatccacaccaaaaacccatctgtacttcaccatcctcaatgatcaaaagtagataaaaccacaaagatgggggaaaaaaagagcagaaaaactggaaactctaaaaagcagagcacctctcctcctccaaaggaatgcagttcctcaccagcaatggaacaaagctggatggagaatgactttcacaagctgagagaagaagccttcagacgatcaaattactccaagctatgggaggacattcaaaccaaaggcaaagaagttgaaaactttgaaaaaaatttagaagaatgtataactagaataaccaatacagagaagtgctttaaggagctgatggagatgaaaaccaaagctcgagaactacgtgaagaatgcagaggcctcaggagcccaagcgatcaactggaagaaggggtatcagcaatggaagatgaaatgaatgaaatgtagggagaagggaagtttagagaaaaaagaataaaaagaaacgagcaaagcctccaagaaatatgagactatgtgaagagaccaaatctacgtctgattggtgtatctgaaagtgacggggagaatggaaccaagttggaaaacactctgcaggatattatccagaagaacttccccaatctaacaaggcagccaacattcagattcaggaaatacagagaacgccaaaaagatactcgggaagagcaattccaagacacattattgtcaggttcaccaaaggtgaaatggaagaaaaaatgttaagggcagccagagagaaaggttgggttaccctcaaagggaggcccatcagactaacagtggatctcttggcagaaaccccacaagccagaagagagtgggggccaatattcaacattcttaaagaaaagaattttcaacccagaatttcatatccagccaaactaagcttcataagtgaaggagaaataaaacagtttatagacaagctaatgctgagagattttgtcaccagcaggcctgtcctaaaacagctccagaaggaagcactaaacatggaaaggaacaaccggtaccagccactgcaaaatcatgccaaaatgtaaagaccattgacactaggaagaaactgcatcaactaacgagcaaaataaccagctaacatcatcatgacaggatcaaattcacacataacaatattaacctcaaatgtaaatgggctaaatgctccaattaaaagacacagactggcaaattggataaacactcaagaccaatccatgtgctgtattcaggaaacctatctcatatgcagagacacacacagtctcaaaataaagggatggaggaagatctaccaagcaaatggaaagcaaaaaaggcaggggttgcaatcctagtctctgataaaacagactttaaatcagcaaagatcaaaagagacaaagaaggccattacataatggtaaagggatcaattcaacaagaagagctaactatcctaaatatatatgcacccaatacaggagcacccagattcataaagcaagtcctgagtgacctacaaagagacttagactcccatacattaataatgggagaatttaacaacccaccatcaacattagacagatcaactagacagaaagtcaacaaggatacccaggaattgaactcagctctgcaccaagcggacctaatagacatctacagaactcaccacccgaaatcaacagaatatacattttttttcagcaccacaccactcctattccaaaattgaccacatacttggaagtaaagctctcctcagcaaatgtaaaataatcgaaattataacaaactatctctcagaccacagtgcaatcaaactagaactcaggattaagaatctcactcaaaccactcaactacatggaaactgaacaacctgctcctgaatgactactgggtacataacgaaatgaaggcagaaataaagaagttatttgaaaccaatgagaacaaagacacacatatcagaatctctgggatgcaatcaaatcagtgtgtagagggaaatttatagcactaaacgcccacaagagaaagcagaaaatatccaaaattgacaccctaacatcacaattaaatgaactagagaagcaagagcaaacacattcaaaatctagcagaaggcaagaaataactaaaatcagagcagaactgaaggaaatagagacacaaaaacccttcaaaaaaataatgaatccaggagctggttttttgaaaggatcaacaaaattgatagaccgctagcaagactaataaagaaaaaaagagagaagaatcaaatagatgcaataaaaaatgataaacgggatatcaccactaatcccacagaaatacaaactaccatcagagaatactacaaacacctctacgcaaataaactagaaaatctagaagaaatggataaattcctcgacacatacaccctcccaagactagaccaggaagaagttgcatctttgaatagaccaataacaggatctgaaattgtggcaataatcaatagcttaccaaccaaaaagagcccaggaccagatggattcacagccgaattctaccagaggtacaaggaggaattggtaccattccttctgaaactattccaatcaacagaaaaagagggaatcctccctaactcattttatgaggccagcatcatcctgataccaaagccgggtagagacacaaccaaaaaagataattttagaccaatatcattgatgaacattgatgcaaaaatcctcaataaaatactggcaaactgaatctagcagcacatcaaaaagcttatccaccatgatcaagtgggcttcatccctgggatgcaaggctggttcaatatacacaaatcaataaatgtaatccagcatataaacagaaccaaagacaaaaaccacatgattatctcaatagatgcagaaaaggcgtttgacaaaattcaacaacccttcatgctaaaaactctcaataaattaggtactgatgggatgtatttcaaaataataagagctatctatgacaaacccacagacaatatcatactgaatgggcaaaaactggtaacattccctttgaaaactggcacaagacagggatgccctctctcatcactcctattcaacatagttttggaagttctggccagggcaattaagcagcagaatgaaataaagggtattcaattaggaaaagaggaagtcaaattgtccatgtttgcagacgacatgattatatatctagaaaaccccattgtctcagcccaaaatttccttaagctgataagcaacttcagcaaagtctcaggatacaaaatcaatgtacaaaaatcacaagcgttcttatacaccaacaacagacaaacagagagccaaatcatgagtgaactcccattcacaattgcttccaagagaataaaatacctaggaatctaacttacaagggatatgaaggaccttttcaaggagagctacaaaccactgctcaatgaaataaaagaggatacaaatggaagaacattccttgctcatgggtaggaagaatcaataatgtgaaaatggccatactgcccaaggtaatttacagattcaatgccatccccatcaagctaccaatgcctttcttcacagaattggaaaaaactactttaaagttcacagggaaccaaaaaagagcccgcatcgccaagtcaatcctaagccaaaagaacaaagctggaggcgtcacactacctgacttcaaactatactacaaagctacagtaatcaaaacagtatggtactggtaccaaaacagagatatagatcaatggaacagaacagagccctcagaaataatgccgcatatctacaactatctgatctttgacaaaactgagaaaaacaagcagtggagaaaggattccctatttaataaatggtgctgggaaaactggctagccatatgtagaaagctgaaactggatcccttccttataccttatacaaaaatcaattcaagatggattaaagactgaaacgttagatgtaaaaccataaaaaccctagaagaaaagctaggaattaccattcaggacatagacatgggccagggcttcatgtctaaaacaccaaaagcaatggcaacaaaagccaaaattgacaaatgggatctaattaaactaaagagcttctgcgcagcaaaagaaattaccatcagagtgaacgggcaacctacaaaatgggagaaaatttttgcaacctactcatctgacaaagggctaatatccagaatctacaatgaactcaaacaaatttacaagaaaaatacaaaaaaccccatcaaaaagtgggcaaagtacatgaacagacacttctcaaaagaagacatttatgcagccaaaaaacacatgaaaaattctcaccctcactggccatcagagaaatgcaaatcaaaaccacaatgagatactgtcacacaccagtaagaatggcaatcaataaaaaggaaacaacaggtgctggagaggatgtggagaaataggaacacttttacactgttggtgggactctaaactagttcaaccattgtggcagtcagtgtggcgattcctcagggatctagaactagaaataccatttgacctggcaatcccattaccgggtatttacacaaaggactataaataatgctgctataaagacacatgcacacatatgtttattgtggcactatgcacaatggcaaagacttggaaccaatccaaatgtccaacaatgatagactggattaagaaaatatggcacatatacaccaaggaatactatgcagccataaaaaatgatgagttcatgtcctttgtagggacgtggatgaaacaggaaatcatcattcccagtaaactatcgcaagaacaaataaccaaacaccgcatattctcactcattcgtggaaattgaacaatgaaaacacatagacacaggaaggagaacatcacactctggggactgttttggggggggaggggggagggatggcatcgggagatatacctaatgctagatgaagagatagtgggtgcagtgcacaagcaaggcacatgtatacatttgtaattaactggcaaattgtgcacatgtatcctaaaaattaagaataataattaaaaaaacaaaaactagaaaaaaaaagaaaataatatagacgaagacagaacaaagacataaagggaaatggagtcttgacaagatttgaatccatgtctgaattcaacattactgcgaaaactttgctgctactttacaatcaattcttttctgatgtaaatgagttcaagttggattttttgtctctttcaacaaataggcctaatatataaataaagaacattttaattaaaaaaaagaaaagaaaagttatgttcaactgtgtgaattgaatgcacacatcacaaagaagtttctgagaatgcttctgtatagtttttatgtgaagacattccccttaccaatgaaggcctcaaagtagtccaaatatccacttgcaggttctacgaaaagagtgtttcaaaactgctctaagaaaaggtatgttcaactctatgagttgaatgcacacatcgcaaagaagtttctgagaatgtttctatctagtttttatgtgaagatgtttccttttccactgtaggcctgaaagttctccaaatgtccacttgcagattttacaaaaagagtgtttattcttgtaaatttgtttgagttcattgtagattctggatattagccctttgtcagatgagtaggttgtgaaaattttctcccattttgtaggttgcctgttcactctgattgtagtttcttttcctgtgcagaagctctttagtttaattagatcccatttgtcaactttggcttttgttgccattgcttttggtgttttagacatgaagtccttgcccatgcctatgtcctgaatggtaatgcctagggtttcttctagggtttttatggttttaagtctaacgtttaagtctttaatccatcttgaattgatttttgtataaggtataaggaagggatccagtttcagctttctacatatggctagccagttttcccagcaccatttattaaatagggaatcctttccccattgcttgtttttctcaggtttgtcaaagatcagatagttttagatatgcagcattatttctgagggctctgttctgttccattgatctatatctctgttttggtaccagtaccatgctgttttggttactgtagccttgtagtatagtttgaagtcaggtagtgtgatgcctccagctttgttcttttggcttaggagtgacttggcgatgtgggctcttttctggttccctatgaactttaaagtagttttttccaattctgtgaagaaaggcattggtagcttgatggggatggcattgaatctgtaaattaccttgggcagtatggccattttcacgatattgattcttcctacccatgagcatggaatgttcttctatttgtttgtatcctcttttatttccttgagcagtggtttgtagttctccttgaagaggtccttcacatcccttgtaaaacaaacaaccccatcaaaaagtgggcaaaggatatgaacagacacttctcaaaagaagacatttatgcagccaaaaaacccatgaaaaaatgctcatcatcactggccatcagagaaatgcaaatcaaaaccacaatgagataccatctcacaccagttagaatggcaatcagtaaaaagtcaggaaacaacaggtgctgaagaggatgtggagaaataggaacacttttacactgttggtgggactgtaaactagttcaaccattgtggaagtcagtgtggcaattcctcagggatctagaactggaaataccatttgacccagccatcccactactgggtatatacccaaaggactataaatcatgctgctataaagacacatgcacacgtatgtttattgcagcattattcacaatagcaaagacttggaagcaacccaaatgtccaacaatgatagactggattaagaaaatgtgacacatatacaccatggaatactatgcagccataaaaaatgatgagttcatgtcctttgtagggacatggatgaaattggaattcatcattctcagtaagctatcgcaataacaaaaaaccaaacaccgcatattctcactcaaaggtgggaattgaaaaatgagatcacatggacacaggaaggagaatatcatactctggggactattgtgggaaggggggaggggggagggatagcatcgggagatatacctaatgctagatgacgagttagtgggtgcagcacaccaacatagcacatgtatagatatgtaacaaacctgcacaatatgcacatgtacgctaaaacaaagtataataataaaaaaaagtgtttaaaaactgctccatcaaaagaaaggttcaaacctgtgagttcaatgcacacatcacaaagaagtttctgagaatgtttctgtctagtttttatgtgaagatattcccatttccaacgaaggcctcagggcagtctaaatatccacttgcagattctaagaaaagagtgtttcagaactgctctatgaacaggtctgttcaaacctgtgagttgaatgcaaacatcgcaaacaagtttctgaaaatgtttctgcctaatttttttgtgaagatatttccttttccaccataggcctcaaagcactacaaaagttcacttgcagattctacaaaaagagtgtttcaaaactgctctttcaaaagaaaggtacaactctgtgagtttaatgcacacgtcacaaagaagtttctgagaatgcttctgtcttgtttttatgtgaagatattcccgttaccaacgaaggcctcaaagcagtccaaatatccacttgcagattctatgataagagtgtttccaaaatgctctatgaacaggtatgttcaactctgtgagctgaatgcgaacatcacaaagaagtttctgagaatgcttctgtctagtttttacgtgaagatatttccttttccaccatagacctcaaagttctccaaatgtccatttgtagattttacaaaaagagtgtttcaaaactgttgtatcaaaagaaagtttcaaacctgttagttgaatgctcatatcacaaagaagtttctgagaatgctcctgtctagtttttatgtgaagatattcccgtttccaatgaaggcctcatggcagtccaattatccacttgcagattctacgaaaagagtgtttcaaaactattctataaatggtatgttcatctctctttgttgaatgcaaacatcagaaagaattttcttagaatgattatgtctggtttttatgtggagatatttccttttccaccataggtctcaaagctttcaaatgtccacttgcagatggtacaaaaagactgtttcaaaactgctctatcaaaagaaaggttccactctgtgagttgaatacacatatcacaaagaagttcctgagaatgcttctgtcaagtttttatgtgaagatattcccgttaccaacgagggcctcaaagcagtccaaatatccacttgcagattctatgaaaagagtgttttaaaactgctctatgaaaagtatgttcaactctgtgagttgaaaggaaacatcacaaagaagtttctgagaatgcttctgtctggtttctatgtgaggatatttccttttgcaccataggactcaaagctttccaaatgtccacttgcagattttacgaaaagagtgtttcaaaactgctgtatcaaaagaaaagttcaactctgtgaattgaatgcacacatcacaaagaagtttctcagaatgtctctgtctagattttatgtgaagatattcccgcttccaacgaaggacttaaagctctccaaatataaacttgcagattctacaagaagcgtgtttcaaaactgctccatcaaaagaaaggttcaactctgtcagttgaatgcacacatcataaagaagtttctgagaatgtttctgtctattttttatgtgaagatatttccttttccaccataggccacaaagctctccaaatgcgcacttgcagatacttcaaaaagagtgtttcaaaactgccctatgaaaagaaaggttcaactctgtgagttgaatgcacacatcacaaagaagtttgagaatgcttctgtctaatttttaggtgaagatatttctttttacaccataggcctcaaagctctccaaatgtccacttgcagattttacaaaaagtgtgtttcaaaactgctctattaaaaggaagattcaactctgtgagttgaatgcacacatcagaaagacgtttctgagaatgcttctgtctagtttttatgtgaatatatacccatttccaacgaagacctcaaaccagtccaaatatccactttcagattcaacaaaaagagtgtttcaaaattgctgtatgaaaaggtatgttcaactctgtgagttgaatgcaagcattacaaaaaagtttctgagaaagcttctgtctggtttttatgtgaagatatttctttttccaccataggcctaaaagatttccaaattttcacttgcagattctacaaagacagtgtttcaaaactgctctatcaaaagaaagattcaactctgtgagttgaatgcacacaccagaaaaccctttctaagaatgattctttctagtttttatgtgaagatattcccgtttacaacgaagaattcaaagtattgcaaatacccaattgcagattctccgaaaagagtgtttcaaaactgatctattaaaaggtatgtgcaactctgtgagttgaatacaaacatcacaaagaagtttgtgagaatgcttctgtctggtttttatgtgaagatatttccttttccaccataggcctcaaagcactacaaatgttcacttgcagattctacaaaaagactgtttcaaaactgctctatcaaaagaaagcttcaactctgtgagttgaatgcaaacaccacaaagtagtttctgagaatgcttctgtctagtttttaagtgaagacatttccttttacaccataggtctcaaaggtctccaaatgtccacttgcaaattctacaaaaagattgtttctaaactgctctatcaaaagaaaggtgcaaccctttaggtgaatgcacaaatcaaaaagcagtttctgagaattcttctgtctagtttttatgtgaagatatccccattaccaaagaaggcctcaaagccgtccaaatatccagttgcagattctaagaaaagagtgtttcaaaacagccctatgaacaggtatgtccaactgtgagttgaatgcaaacatcacaaaggagtttttgagaatacttctgactagttttttcgagaagatatttccttttccaccgtaggcctaaaagcactccaaatgtccacttgcagattctacaaaaagagtttttcaaaactgctctatctaaagaaaagttcaagtatctgagttggatgcacacatcacaaagaagtttctgagaatgcttctgtctagtttttatggaaatatattcccatttccaacgaaggcctcaaggcagtcaaaatatccacttgcagattctacgaaaagagtgtttcaaaactgggctattaaagggtatgttcagctccgtgagttgaatgaaaacatcacaaagaagtttctgagaatgcttctgtctagtttttatgtgaagatatttccttttccgtcataggcctcaaagctctccaaatgtccccttgcagattctacaaaaaaagtgtttcataactgctctatcagaagaaaggttcaactctgtgagttgaatgcacacatcacaaagaagtttctgagaattttctgtctagtttttatgtgaagatattcccgtttccaacgaaggcctcaaaacagtccaaatatccacttgcagattctacgaaaatagtgtttaaaaactgctctatgaacaggtatgttcaactctgtgagttgaatggaaacatcccaaagacgtttctgagaatgcttctgcctagtttttatgtgaagatatttccttttccaccggaggcctgaaagctctccaaatgtccactttcagattcttcaaaaagaggttttcaaaactgttcaatcaaaagaaaagttcaagtctgtgagttgaaggcacacatcacaatgaagtttctgagaatgcttctctcttttttatgggaagacattcccatttccaacaaaggcctcaaagcagtccaaatatacacttgtagattctacgaaaagagtgtttcaaaactgatctatgaaaagctatgttcaactctgtgagttgaatacagacatcacaaagaagattatgagaattcttctgtctgtttttatgtgaagacatttccttttccaccatagtcctcaaagctctccaaatgtatacttgcatttacttgataaagagtgtttcaaaactgctctatcaaaggaaaggttcaagtctgcgtgttgaatgcacacacaacaaagaagtttctcagaatgcttctgtctatttttcatgtgaataaattcccgtttccaaagaagttctcatagcagtgcaaatatctaattgcagatatacgaaaagagtatttcaaaagttctctattgaaaggcatgttcaactctatgagatgaatgcaaacatcagaaagaagtttctgagactgcttctgactagtttttttgtgaacatatttccttttccaccgtaggcctcaaagttctcaaaatgttcacttgcatattctacaaaaagagtgtttcaaaactgctctatcaaaggaaatcttcaaccttgtgtgttgaatgcacacatcacaaaatatttctgagaatgcttctattttttatgtgaagatattcccatttccaacgaatacctttaaggagtccaaatatccaactgcaggttctacgaaaagagtgtttcaaagctgctctatgaaaagatatgttcaactctgttagttgaatgcaaacatcacaaagaagtttctgagactccttctgactagtttttttgtgaacatatttccttttccaacgtagtcctcaaagatctcaaaatgttcacgtgcagattataaaaaggaatatttcaaaactgctctatcaaaagaaagtttcaactctgtgagttgaatgcacacatcacaaagaagtttctgagaatgcttctgtctagattttatgggaagatattcccgtttgcaacgaagaactcaaagcagtccaaatatccacttggagattctacgaaaagagtgtttcaagactgctctatgaaaagtatgttcaactctgtgagtggaatgcaaacatcacaaagaattttctgagaatgcttctttctagtttttatgtgaaggtatttccttttccaccacaggacccacagcgctccaaatgtccacttgcagattctacaaaaagagcgtttcaaaactgctctatcaaaggaaaggtgtaagtctgtgcgttgaatgcacacaccagaaagaagtttctgagaatgcttctgtctagtttttatgtgaagatactcccgtttccaatgagggcatcaaagcagtccaaatatccacttacagattctacgaaaagagtgtttctaaactgctctatgaaaaggtatgttcaactctgtgagatgaaagaaaacatcacaaagaattttctgactgcttctgactggtttttttgtgaacatatttccttttccaccgtaggcctcaaaattctgaaaatgtccactggcagattctacaaaaagagtgtttcaaaactgctctatcaaaagaaagcttcaagtctgtgagttgaacgcaaacatcagaaaggagtttctgagaatgcttctgtctagtttttatgggaatatattcccattcccaatgaatgccttaaaggagtcaaaatatccacttgcagattctacgaaaacagtgtttcaaaactgctgttagaaaaggtatgttcaactctgtgaattgaatgcaaacatcacaaacaagtttctgagaatacttctgtctagtttttatgcgaagatacttccttttgcactgtaggcctcaaagctctcctaatgtccaactgcagatcctacaaaaagagtgtttcaaaactgctctatcaaaacaaaggttcaaatctgtgagttcaatgcacacatcaacaggaagtttctgagaatgcttctgtctagtttttatgtgaagttatccccgtttccaacgaaggcctcaaagcagtccaaatatccacttgcagattctaagaaaagggtgtttcaaaactgccctatgaacgggtatgttcaacaacgtgagttgaacccaaacatcacaaagaagtttctgagaatgcttctgtctagtttttttgtaaagatatttccttttctaccgtaggcctaaaagcactccaagtgtccacttgcacattctacgaaaagagtttttcaaaactgctctatcaaaacaaaagttcaagtctgtgagttggatgcacatatcacaaagaagtttctgagaatgcttctgtctagttttttttgttaatagatacccatttccagcgaaggcctcaaagcagcttaaatatccacttgcaaatcccacggaaagagtttttcaaaactgggctgtgaaaaggtatgttcaactccgtaagttgaatgaaaatataacaaagaagtttctgagaatgcttctgtctagtttttatgtgaatatattcccatttccgacgaaggcctcaaacctgtccaaatatccaatttctgattctacgaaaagagtgtttcaaaactgatatatgaaatggtatgttcagctctgtaagttgaatgcaagcgtcacaaagtagtttctgagaatgcttctgtctggtttttatgtgaagatattccctcttccaacacaggcctcaaagctctacaaatgtccacttgcagattatacaaaaagattgtttcaaaattgctccatcaaaagaaaggttcaactctgtgagttgaatgcacacatcacaaagatgtttctaagaatgcttctgtctagtttttatgtgaagatatttccttttccaccgtacgtctcaaagctctccaaatatcaactttcaaatttaccaaaagagtgtttcaaaactgttctatcaaaagaaaggttcaactctgtgagttgaatgcacagatcacaaagaagtttctgagaatgcttctgtctaggttttatgtgaagatattcgcatttccaaagaaggcctcaaagcagtccaaatatccacttgcagattctacgaaaagagagtttcaaaactgctgtatgaaaaggtatgttcaactctgtgagttgaatgctaacatcacaaacaagtttctgagaatgcttctgtctggtttttatgtgaagatattcctgtttccaatgaaggcctccaaggagtccaaatatccacttgcagattctatgaaaagagtgtttcagaaaacctctataaacaggtatgttgaactctgcgagttgaatgcaaacatcactaagtagtttctgagagtgcttcagtctggtttttatgtaaagatatttccttttccaccataggcctcaaagttctcccagtgtccacttccagattctacaataagagtgtttcaaaactgctctatcaaaagaatggttccactctgtgggttgaatgcacacatcacaaagaagtttctgataatatttctgtctagcttgtatgtgaagatattcccttttccaacgaagacctcaatgccttccaaacatccacctgcagattctacgaaaagagtgtttcaaaactgctctaagaaaaggtatgttcaactcagtgagttgaatgcaagcatcatgaagaagtttctgagaatgcttctgtctagtttttatgtgaagatacttccttttccaccacaggcctcaaagctctccaaatatccacttgcagattctacaaaaagagtgtttcaaaactgctctatcaaaggaaaggttcaacactgtgagtgaaatgcacacatcacctagaagtttctaagaattcnnnnnnnnnnnnnnnnnnnnnnnnnnnnnnnnnnnnnnnnnnnnnnnnnnnnnnnnnnnnnnnnnnnnnnnnnnnnnnnnnnnnnnnnnnnnnnnnnnnnnnnnnnnnnnnnnnnnnnnnnnnnnnnnnnnnnnnnnnnnnnnnnnnnnnnnnnnnnnnnnnnnnnnnnnnnnnnnnnnnnnnnnnnnnnnnnnnnnnnnnnnnnnnnnnnnnnnnnnnnnnnnnnnnnnnnnnnnnnnnnnnnnnnnnnnnnnnnnnnnnnnnnnnnnnnnnnnnnnnnnnnnnnnnnnnnnnnnnnnnnnnnnnnnnnnnnnnnnnnnnnnnnnnnnnnnnnnnnnnnnnnnnnnnnnnnnnnnnnnnnnnnnnnnnnnnnnnnnnnnnnnnnnnnnnnnnnnnnnnnnnnnnnnnnnnnnnnnnnnnnnnnnnnnnnnnnnnnnnnnnnnnnnnnnnnnnnnnnnnnnnnnnnnnnnnnnnnnnnnnnnnnnnnnnnnnnnnnnnnnnnnnnnnnnnnnnnnnnnnnnnnnnnnnnnnnnnnnnnnnnnnnnnnnnnnnnnnnnnnnnnnnnnnnnnnnnnnnnnnnnnnnnnnnnnnnnnnnnnnnnnnnnnnnnnnnnnnnnnnnnnnnnnnnnnnnnnnnnnnnnnnnnnnnnnnnnnnnnnnnnnnnnnnnnnnnnnnnnnnnnnnnnnnnnnnnnnnnnnnnnnnnnnnnnnnnnnnnnnnnnnnnnnnnnnnnnnnnnnnnnnnnnnnnnnnnnnnnnnnnnnnnnnnnnnnnnnnnnnnnnnnnnnnnnnnnnnnnnnnnnnnnnnnnnnnnnnnnnnnnnnnnnnnnnnnnnnnnnnnnnnnnnnnnnnnnnnnnnnnnnnnnnnnnnnnnnnnnnnnnnnnnnnnnnnnnnnnnnnnnnnnnnnnnnnnnnnnnnnnnnnnnnnnnnnnnnnnnnnnnnnnnnnnnnnnnnnnnnnnnnnnnnnnnnnnnnnnnnnnnnnnnnnnnnnnnnnnnnnnnnnnnnnnnnnnnnnnnnnnnnnnnnnnnnnnnnnnnnnnnnnnnnnnnnnnnnnnnnnnnnnnnnnnnnnnnnnnnnnnnnnnnnnnnnnnnnnnnnnnnnnnnnnnnnnnnnnnnnnnnnnnnnnnnnnnnnnnnnnnnnnnnnnnnnnnnnnnnnnnnnnnnnnnnnnnnnnnnnnnnnnnnnnnnnnnnnnnnnnnnnnnnnnnnnnnnnnnnnnnnnnnnnnnnnnnnnnnnnnnnnnnnnnnnnnnnnnnnnnnnnnnnnnnnnnnnnnnnnnnnnnnnnnnnnnnnnnnnnnnnnnnnnnnnnnnnnnnnnnnnnnnnnnnnnnnnnnnnnnnnnnnnnnnnnnnnnnnnnnnnnnnnnnnnnnnnnnnnnnnnnnnnnnnnnnnnnnnnnnnnnnnnnnnnnnnnnnnnnnnnnnnnnnnnnnnnnnnnnnnnnnnnnnnnnnnnnnnnnnnnnnnnnnnnnnnnnnnnnnnnnnnnnnnnnnnnnnnnnnnnnnnnnnnnnnnnnnnnnnnnnnnnnnnnnnnnnnnnnnnnnnnnnnnnnnnnnnnnnnnnnnnnnnnnnnnnnnnnnnnnnnnnnnnnnnnnnnnnnnnnnnnnnnnnnnnnnnnnnnnnnnnnnnnnnnnnnnnnnnnnnnnnnnnnnnnnnnnnnnnnnnnnnnnnnnnnnnnnnnnnnnnnnnnnnnnnnnnnnnnnnnnnnnnnnnnnnnnnnnnnnnnnnnnnnnnnnnnnnnnnnnnnnnnnnnnnnnnnnnnnnnnnnnnnnnnnnnnnnnnnnnnnnnnnnnnnnnnnnnnnnnnnnnnnnnnnnnnnnnnnnnnnnnnnnnnnnnnnnnnnnnnnnnnnnnnnnnnnnnnnnnnnnnnnnnnnnnnnnnnnnnnnnnnnnnnnnnnnnnnnnnnnnnnnnnnnnnnnnnnnnnnnnnnnnnnnnnnnnnnnnnnnnnnnnnnnnnnnnnnnnnnnnnnnnnnnnnnnnnnnnnnnnnnnnnnnnnnnnnnnnnnnnnnnnnnnnnnnnnnnnnnnnnnnnnnnnnnnnnnnnnnnnnnnnnnnnnnnnnnnnnnnnnnnnnnnnnnnnnnnnnnnnnnnnnnnnnnnnnnnnnnnnnnnnnnnnnnnnnnnnnnnnnnnnnnnnnnnnnnnnnnnnnnnnnnnnnnnnnnnnnnnnnnnnnnnnnnnnnnnnnnnnnnnnnnnnnnnnnnnnnnnnnnnnnnnnnnnnnnnnnnnnnnnnnnnnnnnnnnnnnnnnnnnnnnnnnnnnnnnnnnnnnnnnnnnnnnnnnnnnnnnnnnnnnnnnnnnnnnnnnnnnnnnnnnnnnnnnnnnnnnnnnnnnnnnnnnnnnnnnnnnnnnnnnnnnnnnnnnnnnnnnnnnnnnnnnnnnnnnnnnnnnnnnnnnnnnnnnnnnnnnnnnnnnnnnnnnnnnnnnnnnnnnnnnnnnnnnnnnnnnnnnnnnnnnnnnnnnnnnnnnnnnnnnnnnnnnnnnnnnnnnnnnnnnnnnnnnnnnnnnnnnnnnnnnnnnnnnnnnnnnnnnnnnnnnnnnnnnnnnnnnnnnnnnnnnnnnnnnnnnnnnnnnnnnnnnnnnnnnnnnnnnnnnnnnnnnnnnnnnnnnnnnnnnnnnnnnnnnnnnnnnnnnnnnnnnnnnnnnnnnnnnnnnnnnnnnnnnnnnnnnnnnnnnnnnnnnnnnnnnnnnnnnnnnnnnnnnnnnnnnnnnnnnnnnnnnnnnnnnnnnnnnnnnnnnnnnnnnnnnnnnnnnnnnnnnnnnnnnnnnnnnnnnnnnnnnnnnnnnnnnnnnnnnnnnnnnnnnnnnnnnnnnnnnnnnnnnnnnnnnnnnnnnnnnnnnnnnnnnnnnnnnnnnnnnnnnnnnnnnnnnnnnnnnnnnnnnnnnnnnnnnnnnnnnnnnnnnnnnnnnnnnnnnnnnnnnnnnnnnnnnnnnnnnnnnnnnnnnnnnnnnnnnnnnnnnnnnnnnnnnnnnnnnnnnnnnnnnnnnnnnnnnnnnnnnnnnnnnnnnnnnnnnnnnnnnnnnnnnnnnnnnnnnnnnnnnnnnnnnnnnnnnnnnnnnnnnnnnnnnnnnnnnnnnnnnnnnnnnnnnnnnnnnnnnnnnnnnnnnnnnnnnnnnnnnnnnnnnnnnnnnnnnnnnnnnnnnnnnnnnnnnnnnnnnnnnnnnnnnnnnnnnnnnnnnnnnnnnnnnnnnnnnnnnnnnnnnnnnnnnnnnnnnnnnnnnnnnnnnnnnnnnnnnnnnnnnnnnnnnnnnnnnnnnnnnnnnnnnnnnnnnnnnnnnnnnnnnnnnnnnnnnnnnnnnnnnnnnnnnnnnnnnnnnnnnnnnnnnnnnnnnnnnnnnnnnnnnnnnnnnnnnnnnnnnnnnnnnnnnnnnnnnnnnnnnnnnnnnnnnnnnnnnnnnnnnnnnnnnnnnnnnnnnnnnnnnnnnnnnnnnnnnnnnnnnnnnnnnnnnnnnnnnnnnnnnnnnnnnnnnnnnnnnnnnnnnnnnnnnnnnnnnnnnnnnnnnnnnnnnnnnnnnnnnnnnnnnnnnnnnnnnnnnnnnnnnnnnnnnnnnnnnnnnnnnnnnnnnnnnnnnnnnnnnnnnnnnnnnnnnnnnnnnnnnnnnnnnnnnnnnnnnnnnnnnnnnnnnnnnnnnnnnnnnnnnnnnnnnnnnnnnnnnnnnnnnnnnnnnnnnnnnnnnnnnnnnnnnnnnnnnnnnnnnnnnnnnnnnnnnnnnnnnnnnnnnnnnnnnnnnnnnnnnnnnnnnnnnnnnnnnnnnnnnnnnnnnnnnnnnnnnnnnnnnnnnnnnnnnnnnnnnnnnnnnnnnnnnnnnnnnnnnnnnnnnnnnnnnnnnnnnnnnnnnnnnnnnnnnnnnnnnnnnnnnnnnnnnnnnnnnnnnnnnnnnnnnnnnnnnnnnnnnnnnnnnnnnnnnnnnnnnnnnnnnnnnnnnnnnnnnnnnnnnnnnnnnnnnnnnnnnnnnnnnnnnnnnnnnnnnnnnnnnnnnnnnnnnnnnnnnnnnnnnnnnnnnnnnnnnnnnnnnnnnnnnnnnnnnnnnnnnnnnnnnnnnnnnnnnnnnnnnnnnnnnnnnnnnnnnnnnnnnnnnnnnnnnnnnnnnnnnnnnnnnnnnnnnnnnnnnnnnnnnnnnnnnnnnnnnnnnnnnnnnnnnnnnnnnnnnnnnnnnnnnnnnnnnnnnnnnnnnnnnnnnnnnnnnnnnnnnnnnnnnnnnnnnnnnnnnnnnnnnnnnnnnnnnnnnnnnnnnnnnnnnnnnnnnnnnnnnnnnnnnnnnnnnnnnnnnnnnnnnnnnnnnnnnnnnnnnnnnnnnnnnnnnnnnnnnnnnnnnnnnnnnnnnnnnnnnnnnnnnnnnnnnnnnnnnnnnnnnnnnnnnnnnnnnnnnnnnnnnnnnnnnnnnnnnnnnnnnnnnnnnnnnnnnnnnnnnnnnnnnnnnnnnnnnnnnnnnnnnnnnnnnnnnnnnnnnnnnnnnnnnnnnnnnnnnnnnnnnnnnnnnnnnnnnnnnnnnnnnnnnnnnnnnnnnnnnnnnnnnnnnnnnnnnnnnnnnnnnnnnnnnnnnnnnnnnnnnnnnnnnnnnnnnnnnnnnnnnnnnnnnnnnnnnnnnnnnnnnnnnnnnnnnnnnnnnnnnnnnnnnnnnnnnnnnnnnnnnnnnnnnnnnnnnnnnnnnnnnnnnnnnnnnnnnnnnnnnnnnnnnnnnnnnnnnnnnnnnnnnnnnnnnnnnnnnnnnnnnnnnnnnnnnnnnnnnnnnnnnnnnnnnnnnnnnnnnnnnnnnnnnnnnnnnnnnnnnnnnnnnnnnnnnnnnnnnnnnnnnnnnnnnnnnnnnnnnnnnnnnnnnnnnnnnnnnnnnnnnnnnnnnnnnnnnnnnnnnnnnnnnnnnnnnnnnnnnnnnnnnnnnnnnnnnnnnnnnnnnnnnnnnnnnnnnnnnnnnnnnnnnnnnnnnnnnnnnnnnnnnnnnnnnnnnnnnnnnnnnnnnnnnnnnnnnnnnnnnnnnnnnnnnnnnnnnnnnnnnnnnnnnnnnnnnnnnnnnnnnnnnnnnnnnnnnnnnnnnnnnnnnnnnnnnnnnnnnnnnnnnnnnnnnnnnnnnnnnnnnnnnnnnnnnnnnnnnnnnnnnnnnnnnnnnnnnnnnnnnnnnnnnnnnnnnnnnnnnnnnnnnnnnnnnnnnnnnnnnnnnnnnnnnnnnnnnnnnnnnnnnnnnnnnnnnnnnnnnnnnnnnnnnnnnnnnnnnnnnnnnnnnnnnnnnnnnnnnnnnnnnnnnnnnnnnnnnnnnnnnnnnnnnnnnnnnnnnnnnnnnnnnnnnnnnnnnnnnnnnnnnnnnnnnnnnnnnnnnnnnnnnnnnnnnnnnnnnnnnnnnnnnnnnnnnnnnnnnnnnnnnnnnnnnnnnnnnnnnnnnnnnnnnnnnnnnnnnnnnnnnnnnnnnnnnnnnnnnnnnnnnnnnnnnnnnnnnnnnnnnnnnnnnnnnnnnnnnnnnnnnnnnnnnnnnnnnnnnnnnnnnnnnnnnnnnnnnnnnnnnnnnnnnnnnnnnnnnnnnnnnnnnnnnnnnnnnnnnnnnnnnnnnnnnnnnnnnnnnnnnnnnnnnnnnnnnnnnnnnnnnnnnnnnnnnnnnnnnnnnnnnnnnnnnnnnnnnnnnnnnnnnnnnnnnnnnnnnnnnnnnnnnnnnnnnnnnnnnnnnnnnnnnnnnnnnnnnnnnnnnnnnnnnnnnnnnnnnnnnnnnnnnnnnnnnnnnnnnnnnnnnnnnnnnnnnnnnnnnnnnnnnnnnnnnnnnnnnnnnnnnnnnnnnnnnnnnnnnnnnnnnnnnnnnnnnnnnnnnnnnnnnnnnnnnnnnnnnnnnnnnnnnnnnnnnnnnnnnnnnnnnnnnnnnnnnnnnnnnnnnnnnnnnnnnnnnnnnnnnnnnnnnnnnnnnnnnnnnnnnnnnnnnnnnnnnnnnnnnnnnnnnnnnnnnnnnnnnnnnnnnnnnnnnnnnnnnnnnnnnnnnnnnnnnnnnnnnnnnnnnnnnnnnnnnnnnnnnnnnnnnnnnnnnnnnnnnnnnnnnnnnnnnnnnnnnnnnnnnnnnnnnnnnnnnnnnnnnnnnnnnnnnnnnnnnnnnnnnnnnnnnnnnnnnnnnnnnnnnnnnnnnnnnnnnnnnnnnnnnnnnnnnnnnnnnnnnnnnnnnnnnnnnnnnnnnnnnnnnnnnnnnnnnnnnnnnnnnnnnnnnnnnnnnnnnnnnnnnnnnnnnnnnnnnnnnnnnnnnnnnnnnnnnnnnnnnnnnnnnnnnnnnnnnnnnnnnnnnnnnnnnnnnnnnnnnnnnnnnnnnnnnnnnnnnnnnnnnnnnnnnnnnnnnnnnnnnnnnnnnnnnnnnnnnnnnnnnnnnnnnnnnnnnnnnnnnnnnnnnnnnnnnnnnnnnnnnnnnnnnnnnnnnnnnnnnnnnnnnnnnnnnnnnnnnnnnnnnnnnnnnnnnnnnnnnnnnnnnnnnnnnnnnnnnnnnnnnnnnnnnnnnnnnnnnnnnnnnnnnnnnnnnnnnnnnnnnnnnnnnnnnnnnnnnnnnnnnnnnnnnnnnnnnnnnnnnnnnnnnnnnnnnnnnnnnnnnnnnnnnnnnnnnnnnnnnnnnnnnnnnnnnnnnnnnnnnnnnnnnnnnnnnnnnnnnnnnnnnnnnnnnnnnnnnnnnnnnnnnnnnnnnnnnnnnnnnnnnnnnnnnnnnnnnnnnnnnnnnnnnnnnnnnnnnnnnnnnnnnnnnnnnnnnnnnnnnnnnnnnnnnnnnnnnnnnnnnnnnnnnnnnnnnnnnnnnnnnnnnnnnnnnnnnnnnnnnnnnnnnnnnnnnnnnnnnnnnnnnnnnnnnnnnnnnnnnnnnnnnnnnnnnnnnnnnnnnnnnnnnnnnnnnnnnnnnnnnnnnnnnnnnnnnnnnnnnnnnnnnnnnnnnnnnnnnnnnnnnnnnnnnnnnnnnnnnnnnnnnnnnnnnnnnnnnnnnnnnnnnnnnnnnnnnnnnnnnnnnnnnnnnnnnnnnnnnnnnnnnnnnnnnnnnnnnnnnnnnnnnnnnnnnnnnnnnnnnnnnnnnnnnnnnnnnnnnnnnnnnnnnnnnnnnnnnnnnnnnnnnnnnnnnnnnnnnnnnnnnnnnnnnnnnnnnnnnnnnnnnnnnnnnnnnnnnnnnnnnnnnnnnnnnnnnnnnnnnnnnnnnnnnnnnnnnnnnnnnnnnnnnnnnnnnnnnnnnnnnnnnnnnnnnnnnnnnnnnnnnnnnnnnnnnnnnnnnnnnnnnnnnnnnnnnnnnnnnnnnnnnnnnnnnnnnnnnnnnnnnnnnnnnnnnnnnnnnnnnnnnnnnnnnnnnnnnnnnnnnnnnnnnnnnnnnnnnnnnnnnnnnnnnnnnnnnnnnnnnnnnnnnnnnnnnnnnnnnnnnnnnnnnnnnnnnnnnnnnnnnnnnnnnnnnnnnnnnnnnnnnnnnnnnnnnnnnnnnnnnnnnnnnnnnnnnnnnnnnnnnnnnnnnnnnnnnnnnnnnnnnnnnnnnnnnnnnnnnnnnnnnnnnnnnnnnnnnnnnnnnnnnnnnnnnnnnnnnnnnnnnnnnnnnnnnnnnnnnnnnnnnnnnnnnnnnnnnnnnnnnnnnnnnnnnnnnnnnnnnnnnnnnnnnnnnnnnnnnnnnnnnnnnnnnnnnnnnnnnnnnnnnnnnnnnnnnnnnnnnnnnnnnnnnnnnnnnnnnnnnnnnnnnnnnnnnnnnnnnnnnnnnnnnnnnnnnnnnnnnnnnnnnnnnnnnnnnnnnnnnnnnnnnnnnnnnnnnnnnnnnnnnnnnnnnnnnnnnnnnnnnnnnnnnnnnnnnnnnnnnnnnnnnnnnnnnnnnnnnnnnnnnnnnnnnnnnnnnnnnnnnnnnnnnnnnnnnnnnnnnnnnnnnnnnnnnnnnnnnnnnnnnnnnnnnnnnnnnnnnnnnnnnnnnnnnnnnnnnnnnnnnnnnnnnnnnnnnnnnnnnnnnnnnnnnnnnnnnnnnnnnnnnnnnnnnnnnnnnnnnnnnnnnnnnnnnnnnnnnnnnnnnnnnnnnnnnnnnnnnnnnnnnnnnnnnnnnnnnnnnnnnnnnnnnnnnnnnnnnnnnnnnnnnnnnnnnnnnnnnnnnnnnnnnnnnnnnnnnnnnnnnnnnnnnnnnnnnnnnnnnnnnnnnnnnnnnnnnnnnnnnnnnnnnnnnnnnnnnnnnnnnnnnnnnnnnnnnnnnnnnnnnnnnnnnnnnnnnnnnnnnnnnnnnnnnnnnnnnnnnnnnnnnnnnnnnnnnnnnnnnnnnnnnnnnnnnnnnnnnnnnnnnnnnnnnnnnnnnnnnnnnnnnnnnnnnnnnnnnnnnnnnnnnnnnnnnnnnnnnnnnnnnnnnnnnnnnnnnnnnnnnnnnnnnnnnnnnnnnnnnnnnnnnnnnnnnnnnnnnnnnnnnnnnnnnnnnnnnnnnnnnnnnnnnnnnnnnnnnnnnnnnnnnnnnnnnnnnnnnnnnnnnnnnnnnnnnnnnnnnnnnnnnnnnnnnnnnnnnnnnnnnnnnnnnnnnnnnnnnnnnnnnnnnnnnnnnnnnnnnnnnnnnnnnnnnnnnnnnnnnnnnnnnnnnnnnnnnnnnnnnnnnnnnnnnnnnnnnnnnnnnnnnnnnnnnnnnnnnnnnnnnnnnnnnnnnnnnnnnnnnnnnnnnnnnnnnnnnnnnnnnnnnnnnnnnnnnnnnnnnnnnnnnnnnnnnnnnnnnnnnnnnnnnnnnnnnnnnnnnnnnnnnnnnnnnnnnnnnnnnnnnnnnnnnnnnnnnnnnnnnnnnnnnnnnnnnnnnnnnnnnnnnnnnnnnnnnnnnnnnnnnnnnnnnnnnnnnnnnnnnnnnnnnnnnnnnnnnnnnnnnnnnnnnnnnnnnnnnnnnnnnnnnnnnnnnnnnnnnnnnnnnnnnnnnnnnnnnnnnnnnnnnnnnnnnnnnnnnnnnnnnnnnnnnnnnnnnnnnnnnnnnnnnnnnnnnnnnnnnnnnnnnnnnnnnnnnnnnnnnnnnnnnnnnnnnnnnnnnnnnnnnnnnnnnnnnnnnnnnnnnnnnnnnnnnnnnnnnnnnnnnnnnnnnnnnnnnnnnnnnnnnnnnnnnnnnnnnnnnnnnnnnnnnnnnnnnnnnnnnnnnnnnnnnnnnnnnnnnnnnnnnnnnnnnnnnnnnnnnnnnnnnnnnnnnnnnnnnnnnnnnnnnnnnnnnnnnnnnnnnnnnnnnnnnnnnnnnnnnnnnnnnnnnnnnnnnnnnnnnnnnnnnnnnnnnnnnnnnnnnnnnnnnnnnnnnnnnnnnnnnnnnnnnnnnnnnnnnnnnnnnnnnnnnnnnnnnnnnnnnnnnnnnnnnnnnnnnnnnnnnnnnnnnnnnnnnnnnnnnnnnnnnnnnnnnnnnnnnnnnnnnnnnnnnnnnnnnnnnnnnnnnnnnnnnnnnnnnnnnnnnnnnnnnnnnnnnnnnnnnnnnnnnnnnnnnnnnnnnnnnnnnnnnnnnnnnnnnnnnnnnnnnnnnnnnnnnnnnnnnnnnnnnnnnnnnnnnnnnnnnnnnnnnnnnnnnnnnnnnnnnnnnnnnnnnnnnnnnnnnnnnnnnnnnnnnnnnnnnnnnnnnnnnnnnnnnnnnnnnnnnnnnnnnnnnnnnnnnnnnnnnnnnnnnnnnnnnnnnnnnnnnnnnnnnnnnnnnnnnnnnnnnnnnnnnnnnnnnnnnnnnnnnnnnnnnnnnnnnnnnnnnnnnnnnnnnnnnnnnnnnnnnnnnnnnnnnnnnnnnnnnnnnnnnnnnnnnnnnnnnnnnnnnnnnnnnnnnnnnnnnnnnnnnnnnnnnnnnnnnnnnnnnnnnnnnnnnnnnnnnnnnnnnnnnnnnnnnnnnnnnnnnnnnnnnnnnnnnnnnnnnnnnnnnnnnnnnnnnnnnnnnnnnnnnnnnnnnnnnnnnnnnnnnnnnnnnnnnnnnnnnnnnnnnnnnnnnnnnnnnnnnnnnnnnnnnnnnnnnnnnnnnnnnnnnnnnnnnnnnnnnnnnnnnnnnnnnnnnnnnnnnnnnnnnnnnnnnnnnnnnnnnnnnnnnnnnnnnnnnnnnnnnnnnnnnnnnnnnnnnnnnnnnnnnnnnnnnnnnnnnnnnnnnnnnnnnnnnnnnnnnnnnnnnnnnnnnnnnnnnnnnnnnnnnnnnnnnnnnnnnnnnnnnnnnnnnnnnnnnnnnnnnnnnnnnnnnnnnnnnnnnnnnnnnnnnnnnnnnnnnnnnnnnnnnnnnnnnnnnnnnnnnnnnnnnnnnnnnnnnnnnnnnnnnnnnnnnnnnnnnnnnnnnnnnnnnnnnnnnnnnnnnnnnnnnnnnnnnnnnnnnnnnnnnnnnnnnnnnnnnnnnnnnnnnnnnnnnnnnnnnnnnnnnnnnnnnnnnnnnnnnnnnnnnnnnnnnnnnnnnnnnnnnnnnnnnnnnnnnnnnnnnnnnnnnnnnnnnnnnnnnnnnnnnnnnnnnnnnnnnnnnnnnnnnnnnnnnnnnnnnnnnnnnnnnnnnnnnnnnnnnnnnnnnnnnnnnnnnnnnnnnnnnnnnnnnnnnnnnnnnnnnnnnnnnnnnnnnnnnnnnnnnnnnnnnnnnnnnnnnnnnnnnnnnnnnnnnnnnnnnnnnnnnnnnnnnnnnnnnnnnnnnnnnnnnnnnnnnnnnnnnnnnnnnnnnnnnnnnnnnnnnnnnnnnnnnnnnnnnnnnnnnnnnnnnnnnnnnnnnnnnnnnnnnnnnnnnnnnnnnnnnnnnnnnnnnnnnnnnnnnnnnnnnnnnnnnnnnnnnnnnnnnnnnnnnnnnnnnnnnnnnnnnnnnnnnnnnnnnnnnnnnnnnnnnnnnnnnnnnnnnnnnnnnnnnnnnnnnnnnnnnnnnnnnnnnnnnnnnnnnnnnnnnnnnnnnnnnnnnnnnnnnnnnnnnnnnnnnnnnnnnnnnnnnnnnnnnnnnnnnnnnnnnnnnnnnnnnnnnnnnnnnnnnnnnnnnnnnnnnnnnnnnnnnnnnnnnnnnnnnnnnnnnnnnnnnnnnnnnnnnnnnnnnnnnnnnnnnnnnnnnnnnnnnnnnnnnnnnnnnnnnnnnnnnnnnnnnnnnnnnnnnnnnnnnnnnnnnnnnnnnnnnnnnnnnnnnnnnnnnnnnnnnnnnnnnnnnnnnnnnnnnnnnnnnnnnnnnnnnnnnnnnnnnnnnnnnnnnnnnnnnnnnnnnnnnnnnnnnnnnnnnnnnnnnnnnnnnnnnnnnnnnnnnnnnnnnnnnnnnnnnnnnnnnnnnnnnnnnnnnnnnnnnnnnnnnnnnnnnnnnnnnnnnnnnnnnnnnnnnnnnnnnnnnnnnnnnnnnnnnnnnnnnnnnnnnnnnnnnnnnnnnnnnnnnnnnnnnnnnnnnnnnnnnnnnnnnnnnnnnnnnnnnnnnnnnnnnnnnnnnnnnnnnnnnnnnnnnnnnnnnnnnnnnnnnnnnnnnnnnnnnnnnnnnnnnnnnnnnnnnnnnnnnnnnnnnnnnnnnnnnnnnnnnnnnnnnnnnnnnnnnnnnnnnnnnnnnnnnnnnnnnnnnnnnnnnnnnnnnnnnnnnnnnnnnnnnnnnnnnnnnnnnnnnnnnnnnnnnnnnnnnnnnnnnnnnnnnnnnnnnnnnnnnnnnnnnnnnnnnnnnnnnnnnnnnnnnnnnnnnnnnnnnnnnnnnnnnnnnnnnnnnnnnnnnnnnnnnnnnnnnnnnnnnnnnnnnnnnnnnnnnnnnnnnnnnnnnnnnnnnnnnnnnnnnnnnnnnnnnnnnnnnnnnnnnnnnnnnnnnnnnnnnnnnnnnnnnnnnnnnnnnnnnnnnnnnnnnnnnnnnnnnnnnnnnnnnnnnnnnnnnnnnnnnnnnnnnnnnnnnnnnnnnnnnnnnnnnnnnnnnnnnnnnnnnnnnnnnnnnnnnnnnnnnnnnnnnnnnnnnnnnnnnnnnnnnnnnnnnnnnnnnnnnnnnnnnnnnnnnnnnnnnnnnnnnnnnnnnnnnnnnnnnnnnnnnnnnnnnnnnnnnnnnnnnnnnnnnnnnnnnnnnnnnnnnnnnnnnnnnnnnnnnnnnnnnnnnnnnnnnnnnnnnnnnnnnnnnnnnnnnnnnnnnnnnnnnnnnnnnnnnnnnnnnnnnnnnnnnnnnnnnnnnnnnnnnnnnnnnnnnnnnnnnnnnnnnnnnnnnnnnnnnnnnnnnnnnnnnnnnnnnnnnnnnnnnnnnnnnnnnnnnnnnnnnnnnnnnnnnnnnnnnnnnnnnnnnnnnnnnnnnnnnnnnnnnnnnnnnnnnnnnnnnnnnnnnnnnnnnnnnnnnnnnnnnnnnnnnnnnnnnnnnnnnnnnnnnnnnnnnnnnnnnnnnnnnnnnnnnnnnnnnnnnnnnnnnnnnnnnnnnnnnnnnnnnnnnnnnnnnnnnnnnnnnnnnnnnnnnnnnnnnnnnnnnnnnnnnnnnnnnnnnnnnnnnnnnnnnnnnnnnnnnnnnnnnnnnnnnnnnnnnnnnnnnnnnnnnnnnnnnnnnnnnnnnnnnnnnnnnnnnnnnnnnnnnnnnnnnnnnnnnnnnnnnnnnnnnnnnnnnnnnnnnnnnnnnnnnnnnnnnnnnnnnnnnnnnnnnnnnnnnnnnnnnnnnnnnnnnnnnnnnnnnnnnnnnnnnnnnnnnnnnnnnnnnnnnnnnnnnnnnnnnnnnnnnnnnnnnnnnnnnnnnnnnnnnnnnnnnnnnnnnnnnnnnnnnnnnnnnnnnnnnnnnnnnnnnnnnnnnnnnnnnnnnnnnnnnnnnnnnnnnnnnnnnnnnnnnnnnnnnnnnnnnnnnnnnnnnnnnnnnnnnnnnnnnnnnnnnnnnnnnnnnnnnnnnnnnnnnnnnnnnnnnnnnnnnnnnnnnnnnnnnnnnnnnnnnnnnnnnnnnnnnnnnnnnnnnnnnnnnnnnnnnnnnnnnnnnnnnnnnnnnnnnnnnnnnnnnnnnnnnnnnnnnnnnnnnnnnnnnnnnnnnnnnnnnnnnnnnnnnnnnnnnnnnnnnnnnnnnnnnnnnnnnnnnnnnnnnnnnnnnnnnnnnnnnnnnnnnnnnnnnnnnnnnnnnnnnnnnnnnnnnnnnnnnnnnnnnnnnnnnnnnnnnnnnnnnnnnnnnnnnnnnnnnnnnnnnnnnnnnnnnnnnnnnnnnnnnnnnnnnnnnnnnnnnnnnnnnnnnnnnnnnnnnnnnnnnnnnnnnnnnnnnnnnnnnnnnnnnnnnnnnnnnnnnnnnnnnnnnnnnnnnnnnnnnnnnnnnnnnnnnnnnnnnnnnnnnnnnnnnnnnnnnnnnnnnnnnnnnnnnnnnnnnnnnnnnnnnnnnnnnnnnnnnnnnnnnnnnnnnnnnnnnnnnnnnnnnnnnnnnnnnnnnnnnnnnnnnnnnnnnnnnnnnnnnnnnnnnnnnnnnnnnnnnnnnnnnnnnnnnnnnnnnnnnnnnnnnnnnnnnnnnnnnnnnnnnnnnnnnnnnnnnnnnnnnnnnnnnnnnnnnnnnnnnnnnnnnnnnnnnnnnnnnnnnnnnnnnnnnnnnnnnnnnnnnnnnnnnnnnnnnnnnnnnnnnnnnnnnnnnnnnnnnnnnnnnnnnnnnnnnnnnnnnnnnnnnnnnnnnnnnnnnnnnnnnnnnnnnnnnnnnnnnnnnnnnnnnnnnnnnnnnnnnnnnnnnnnnnnnnnnnnnnnnnnnnnnnnnnnnnnnnnnnnnnnnnnnnnnnnnnnnnnnnnnnnnnnnnnnnnnnnnnnnnnnnnnnnnnnnnnnnnnnnnnnnnnnnnnnnnnnnnnnnnnnnnnnnnnnnnnnnnnnnnnnnnnnnnnnnnnnnnnnnnnnnnnnnnnnnnnnnnnnnnnnnnnnnnnnnnnnnnnnnnnnnnnnnnnnnnnnnnnnnnnnnnnnnnnnnnnnnnnnnnnnnnnnnnnnnnnnnnnnnnnnnnnnnnnnnnnnnnnnnnnnnnnnnnnnnnnnnnnnnnnnnnnnnnnnnnnnnnnnnnnnnnnnnnnnnnnnnnnnnnnnnnnnnnnnnnnnnnnnnnnnnnnnnnnnnnnnnnnnnnnnnnnnnnnnnnnnnnnnnnnnnnnnnnnnnnnnnnnnnnnnnnnnnnnnnnnnnnnnnnnnnnnnnnnnnnnnnnnnnnnnnnnnnnnnnnnnnnnnnnnnnnnnnnnnnnnnnnnnnnnnnnnnnnnnnnnnnnnnnnnnnnnnnnnnnnnnnnnnnnnnnnnnnnnnnnnnnnnnnnnnnnnnnnnnnnnnnnnnnnnnnnnnnnnnnnnnnnnnnnnnnnnnnnnnnnnnnnnnnnnnnnnnnnnnnnnnnnnnnnnnnnnnnnnnnnnnnnnnnnnnnnnnnnnnnnnnnnnnnnnnnnnnnnnnnnnnnnnnnnnnnnnnnnnnnnnnnnnnnnnnnnnnnnnnnnnnnnnnnnnnnnnnnnnnnnnnnnnnnnnnnnnnnnnnnnnnnnnnnnnnnnnnnnnnnnnnnnnnnnnnnnnnnnnnnnnnnnnnnnnnnnnnnnnnnnnnnnnnnnnnnnnnnnnnnnnnnnnnnnnnnnnnnnnnnnnnnnnnnnnnnnnnnnnnnnnnnnnnnnnnnnnnnnnnnnnnnnnnnnnnnnnnnnnnnnnnnnnnnnnnnnnnnnnnnnnnnnnnnnnnnnnnnnnnnnnnnnnnnnnnnnnnnnnnnnnnnnnnnnnnnnnnnnnnnnnnnnnnnnnnnnnnnnnnnnnnnnnnnnnnnnnnnnnnnnnnnnnnnnnnnnnnnnnnnnnnnnnnnnnnnnnnnnnnnnnnnnnnnnnnnnnnnnnnnnnnnnnnnnnnnnnnnnnnnnnnnnnnnnnnnnnnnnnnnnnnnnnnnnnnnnnnnnnnnnnnnnnnnnnnnnnnnnnnnnnnnnnnnnnnnnnnnnnnnnnnnnnnnnnnnnnnnnnnnnnnnnnnnnnnnnnnnnnnnnnnnnnnnnnnnnnnnnnnnnnnnnnnnnnnnnnnnnnnnnnnnnnnnnnnnnnnnnnnnnnnnnnnnnnnnnnnnnnnnnnnnnnnnnnnnnnnnnnnnnnnnnnnnnnnnnnnnnnnnnnnnnnnnnnnnnnnnnnnnnnnnnnnnnnnnnnnnnnnnnnnnnnnnnnnnnnnnnnnnnnnnnnnnnnnnnnnnnnnnnnnnnnnnnnnnnnnnnnnnnnnnnnnnnnnnnnnnnnnnnnnnnnnnnnnnnnnnnnnnnnnnnnnnnnnnnnnnnnnnnnnnnnnnnnnnnnnnnnnnnnnnnnnnnnnnnnnnnnnnnnnnnnnnnnnnnnnnnnnnnnnnnnnnnnnnnnnnnnnnnnnnnnnnnnnnnnnnnnnnnnnnnnnnnnnnnnnnnnnnnnnnnnnnnnnnnnnnnnnnnnnnnnnnnnnnnnnnnnnnnnnnnnnnnnnnnnnnnnnnnnnnnnnnnnnnnnnnnnnnnnnnnnnnnnnnnnnnnnnnnnnnnnnnnnnnnnnnnnnnnnnnnnnnnnnnnnnnnnnnnnnnnnnnnnnnnnnnnnnnnnnnnnnnnnnnnnnnnnnnnnnnnnnnnnnnnnnnnnnnnnnnnnnnnnnnnnnnnnnnnnnnnnnnnnnnnnnnnnnnnnnnnnnnnnnnnnnnnnnnnnnnnnnnnnnnnnnnnnnnnnnnnnnnnnnnnnnnnnnnnnnnnnnnnnnnnnnnnnnnnnnnnnnnnnnnnnnnnnnnnnnnnnnnnnnnnnnnnnnnnnnnnnnnnnnnnnnnnnnnnnnnnnnnnnnnnnnnnnnnnnnnnnnnnnnnnnnnnnnnnnnnnnnnnnnnnnnnnnnnnnnnnnnnnnnnnnnnnnnnnnnnnnnnnnnnnnnnnnnnnnnnnnnnnnnnnnnnnnnnnnnnnnnnnnnnnnnnnnnnnnnnnnnnnnnnnnnnnnnnnnnnnnnnnnnnnnnnnnnnnnnnnnnnnnnnnnnnnnnnnnnnnnnnnnnnnnnnnnnnnnnnnnnnnnnnnnnnnnnnnnnnnnnnnnnnnnnnnnnnnnnnnnnnnnnnnnnnnnnnnnnnnnnnnnnnnnnnnnnnnnnnnnnnnnnnnnnnnnnnnnnnnnnnnnnnnnnnnnnnnnnnnnnnnnnnnnnnnnnnnnnnnnnnnnnnnnnnnnnnnnnnnnnnnnnnnnnnnnnnnnnnnnnnnnnnnnnnnnnnnnnnnnnnnnnnnnnnnnnnnnnnnnnnnnnnnnnnnnnnnnnnnnnnnnnnnnnnnnnnnnnnnnnnnnnnnnnnnnnnnnnnnnnnnnnnnnnnnnnnnnnnnnnnnnnnnnnnnnnnnnnnnnnnnnnnnnnnnnnnnnnnnnnnnnnnnnnnnnnnnnnnnnnnnnnnnnnnnnnnnnnnnnnnnnnnnnnnnnnnnnnnnnnnnnnnnnnnnnnnnnnnnnnnnnnnnnnnnnnnnnnnnnnnnnnnnnnnnnnnnnnnnnnnnnnnnnnnnnnnnnnnnnnnnnnnnnnnnnnnnnnnnnnnnnnnnnnnnnnnnnnnnnnnnnnnnnnnnnnnnnnnnnnnnnnnnnnnnnnnnnnnnnnnnnnnnnnnnnnnnnnnnnnnnnnnnnnnnnnnnnnnnnnnnnnnnnnnnnnnnnnnnnnnnnnnnnnnnnnnnnnnnnnnnnnnnnnnnnnnnnnnnnnnnnnnnnnnnnnnnnnnnnnnnnnnnnnnnnnnnnnnnnnnnnnnnnnnnnnnnnnnnnnnnnnnnnnnnnnnnnnnnnnnnnnnnnnnnnnnnnnnnnnnnnnnnnnnnnnnnnnnnnnnnnnnnnnnnnnnnnnnnnnnnnnnnnnnnnnnnnnnnnnnnnnnnnnnnnnnnnnnnnnnnnnnnnnnnnnnnnnnnnnnnnnnnnnnnnnnnnnnnnnnnnnnnnnnnnnnnnnnnnnnnnnnnnnnnnnnnnnnnnnnnnnnnnnnnnnnnnnnnnnnnnnnnnnnnnnnnnnnnnnnnnnnnnnnnnnnnnnnnnnnnnnnnnnnnnnnnnnnnnnnnnnnnnnnnnnnnnnnnnnnnnnnnnnnnnnnnnnnnnnnnnnnnnnnnnnnnnnnnnnnnnnnnnnnnnnnnnnnnnnnnnnnnnnnnnnnnnnnnnnnnnnnnnnnnnnnnnnnnnnnnnnnnnnnnnnnnnnnnnnnnnnnnnnnnnnnnnnnnnnnnnnnnnnnnnnnnnnnnnnnnnnnnnnnnnnnnnnnnnnnnnnnnnnnnnnnnnnnnnnnnnnnnnnnnnnnnnnnnnnnnnnnnnnnnnnnnnnnnnnnnnnnnnnnnnnnnnnnnnnnnnnnnnnnnnnnnnnnnnnnnnnnnnnnnnnnnnnnnnnnnnnnnnnnnnnnnnnnnnnnnnnnnnnnnnnnnnnnnnnnnnnnnnnnnnnnnnnnnnnnnnnnnnnnnnnnnnnnnnnnnnnnnnnnnnnnnnnnnnnnnnnnnnnnnnnnnnnnnnnnnnnnnnnnnnnnnnnnnnnnnnnnnnnnnnnnnnnnnnnnnnnnnnnnnnnnnnnnnnnnnnnnnnnnnnnnnnnnnnnnnnnnnnnnnnnnnnnnnnnnnnnnnnnnnnnnnnnnnnnnnnnnnnnnnnnnnnnnnnnnnnnnnnnnnnnnnnnnnnnnnnnnnnnnnnnnnnnnnnnnnnnnnnnnnnnnnnnnnnnnnnnnnnnnnnnnnnnnnnnnnnnnnnnnnnnnnnnnnnnnnnnnnnnnnnnnnnnnnnnnnnnnnnnnnnnnnnnnnnnnnnnnnnnnnnnnnnnnnnnnnnnnnnnnnnnnnnnnnnnnnnnnnnnnnnnnnnnnnnnnnnnnnnnnnnnnnnnnnnnnnnnnnnnnnnnnnnnnnnnnnnnnnnnnnnnnnnnnnnnnnnnnnnnnnnnnnnnnnnnnnnnnnnnnnnnnnnnnnnnnnnnnnnnnnnnnnnnnnnnnnnnnnnnnnnnnnnnnnnnnnnnnnnnnnnnnnnnnnnnnnnnnnnnnnnnnnnnnnnnnnnnnnnnnnnnnnnnnnnnnnnnnnnnnnnnnnnnnnnnnnnnnnnnnnnnnnnnnnnnnnnnnnnnnnnnnnnnnnnnnnnnnnnnnnnnnnnnnnnnnnnnnnnnnnnnnnnnnnnnnnnnnnnnnnnnnnnnnnnnnnnnnnnnnnnnnnnnnnnnnnnnnnnnnnnnnnnnnnnnnnnnnnnnnnnnnnnnnnnnnnnnnnnnnnnnnnnnnnnnnnnnnnnnnnnnnnnnnnnnnnnnnnnnnnnnnnnnnnnnnnnnnnnnnnnnnnnnnnnnnnnnnnnnnnnnnnnnnnnnnnnnnnnnnnnnnnnnnnnnnnnnnnnnnnnnnnnnnnnnnnnnnnnnnnnnnnnnnnnnnnnnnnnnnnnnnnnnnnnnnnnnnnnnnnnnnnnnnnnnnnnnnnnnnnnnnnnnnnnnnnnnnnnnnnnnnnnnnnnnnnnnnnnnnnnnnnnnnnnnnnnnnnnnnnnnnnnnnnnnnnnnnnnnnnnnnnnnnnnnnnnnnnnnnnnnnnnnnnnnnnnnnnnnnnnnnnnnnnnnnnnnnnnnnnnnnnnnnnnnnnnnnnnnnnnnnnnnnnnnnnnnnnnnnnnnnnnnnnnnnnnnnnnnnnnnnnnnnnnnnnnnnnnnnnnnnnnnnnnnnnnnnnnnnnnnnnnnnnnnnnnnnnnnnnnnnnnnnnnnnnnnnnnnnnnnnnnnnnnnnnnnnnnnnnnnnnnnnnnnnnnnnnnnnnnnnnnnnnnnnnnnnnnnnnnnnnnnnnnnnnnnnnnnnnnnnnnnnnnnnnnnnnnnnnnnnnnnnnnnnnnnnnnnnnnnnnnnnnnnnnnnnnnnnnnnnnnnnnnnnnnnnnnnnnnnnnnnnnnnnnnnnnnnnnnnnnnnnnnnnnnnnnnnnnnnnnnnnnnnnnnnnnnnnnnnnnnnnnnnnnnnnnnnnnnnnnnnnnnnnnnnnnnnnnnnnnnnnnnnnnnnnnnnnnnnnnnnnnnnnnnnnnnnnnnnnnnnnnnnnnnnnnnnnnnnnnnnnnnnnnnnnnnnnnnnnnnnnnnnnnnnnnnnnnnnnnnnnnnnnnnnnnnnnnnnnnnnnnnnnnnnnnnnnnnnnnnnnnnnnnnnnnnnnnnnnnnnnnnnnnnnnnnnnnnnnnnnnnnnnnnnnnnnnnnnnnnnnnnnnnnnnnnnnnnnnnnnnnnnnnnnnnnnnnnnnnnnnnnnnnnnnnnnnnnnnnnnnnnnnnnnnnnnnnnnnnnnnnnnnnnnnnnnnnnnnnnnnnnnnnnnnnnnnnnnnnnnnnnnnnnnnnnnnnnnnnnnnnnnnnnnnnnnnnnnnnnnnnnnnnnnnnnnnnnnnnnnnnnnnnnnnnnnnnnnnnnnnnnnnnnnnnnnnnnnnnnnnnnnnnnnnnnnnnnnnnnnnnnnnnnnnnnnnnnnnnnnnnnnnnnnnnnnnnnnnnnnnnnnnnnnnnnnnnnnnnnnnnnnnnnnnnnnnnnnnnnnnnnnnnnnnnnnnnnnnnnnnnnnnnnnnnnnnnnnnnnnnnnnnnnnnnnnnnnnnnnnnnnnnnnnnnnnnnnnnnnnnnnnnnnnnnnnnnnnnnnnnnnnnnnnnnnnnnnnnnnnnnnnnnnnnnnnnnnnnnnnnnnnnnnnnnnnnnnnnnnnnnnnnnnnnnnnnnnnnnnnnnnnnnnnnnnnnnnnnnnnnnnnnnnnnnnnnnnnnnnnnnnnnnnnnnnnnnnnnnnnnnnnnnnnnnnnnnnnnnnnnnnnnnnnnnnnnnnnnnnnnnnnnnnnnnnnnnnnnnnnnnnnnnnnnnnnnnnnnnnnnnnnnnnnnnnnnnnnnnnnnnnnnnnnnnnnnnnnnnnnnnnnnnnnnnnnnnnnnnnnnnnnnnnnnnnnnnnnnnnnnnnnnnnnnnnnnnnnnnnnnnnnnnnnnnnnnnnnnnnnnnnnnnnnnnnnnnnnnnnnnnnnnnnnnnnnnnnnnnnnnnnnnnnnnnnnnnnnnnnnnnnnnnnnnnnnnnnnnnnnnnnnnnnnnnnnnnnnnnnnnnnnnnnnnnnnnnnnnnnnnnnnnnnnnnnnnnnnnnnnnnnnnnnnnnnnnnnnnnnnnnnnnnnnnnnnnnnnnnnnnnnnnnnnnnnnnnnnnnnnnnnnnnnnnnnnnnnnnnnnnnnnnnnnnnnnnnnnnnnnnnnnnnnnnnnnnnnnnnnnnnnnnnnnnnnnnnnnnnnnnnnnnnnnnnnnnnnnnnnnnnnnnnnnnnnnnnnnnnnnnnnnnnnnnnnnnnnnnnnnnnnnnnnnnnnnnnnnnnnnnnnnnnnnnnnnnnnnnnnnnnnnnnnnnnnnnnnnnnnnnnnnnnnnnnnnnnnnnnnnnnnnnnnnnnnnnnnnnnnnnnnnnnnnnnnnnnnnnnnnnnnnnnnnnnnnnnnnnnnnnnnnnnnnnnnnnnnnnnnnnnnnnnnnnnnnnnnnnnnnnnnnnnnnnnnnnnnnnnnnnnnnnnnnnnnnnnnnnnnnnnnnnnnnnnnnnnnnnnnnnnnnnnnnnnnnnnnnnnnnnnnnnnnnnnnnnnnnnnnnnnnnnnnnnnnnnnnnnnnnnnnnnnnnnnnnnnnnnnnnnnnnnnnnnnnnnnnnnnnnnnnnnnnnnnnnnnnnnnnnnnnnnnnnnnnnnnnnnnnnnnnnnnnnnnnnnnnnnnnnnnnnnnnnnnnnnnnnnnnnnnnnnnnnnnnnnnnnnnnnnnnnnnnnnnnnnnnnnnnnnnnnnnnnnnnnnnnnnnnnnnnnnnnnnnnnnnnnnnnnnnnnnnnnnnnnnnnnnnnnnnnnnnnnnnnnnnnnnnnnnnnnnnnnnnnnnnnnnnnnnnnnnnnnnnnnnnnnnnnnnnnnnnnnnnnnnnnnnnnnnnnnnnnnnnnnnnnnnnnnnnnnnnnnnnnnnnnnnnnnnnnnnnnnnnnnnnnnnnnnnnnnnnnnnnnnnnnnnnnnnnnnnnnnnnnnnnnnnnnnnnnnnnnnnnnnnnnnnnnnnnnnnnnnnnnnnnnnnnnnnnnnnnnnnnnnnnnnnnnnnnnnnnnnnnnnnnnnnnnnnnnnnnnnnnnnnnnnnnnnnnnnnnnnnnnnnnnnnnnnnnnnnnnnnnnnnnnnnnnnnnnnnnnnnnnnnnnnnnnnnnnnnnnnnnnnnnnnnnnnnnnnnnnnnnnnnnnnnnnnnnnnnnnnnnnnnnnnnnnnnnnnnnnnnnnnnnnnnnnnnnnnnnnnnnnnnnnnnnnnnnnnnnnnnnnnnnnnnnnnnnnnnnnnnnnnnnnnnnnnnnnnnnnnnnnnnnnnnnnnnnnnnnnnnnnnnnnnnnnnnnnnnnnnnnnnnnnnnnnnnnnnnnnnnnnnnnnnnnnnnnnnnnnnnnnnnnnnnnnnnnnnnnnnnnnnnnnnnnnnnnnnnnnnnnnnnnnnnnnnnnnnnnnnnnnnnnnnnnnnnnnnnnnnnnnnnnnnnnnnnnnnnnnnnnnnnnnnnnnnnnnnnnnnnnnnnnnnnnnnnnnnnnnnnnnnnnnnnnnnnnnnnnnnnnnnnnnnnnnnnnnnnnnnnnnnnnnnnnnnnnnnnnnnnnnnnnnnnnnnnnnnnnnnnnnnnnnnnnnnnnnnnnnnnnnnnnnnnnnnnnnnnnnnnnnnnnnnnnnnnnnnnnnnnnnnnnnnnnnnnnnnnnnnnnnnnnnnnnnnnnnnnnnnnnnnnnnnnnnnnnnnnnnnnnnnnnnnnnnnnnnnnnnnnnnnnnnnnnnnnnnnnnnnnnnnnnnnnnnnnnnnnnnnnnnnnnnnnnnnnnnnnnnnnnnnnnnnnnnnnnnnnnnnnnnnnnnnnnnnnnnnnnnnnnnnnnnnnnnnnnnnnnnnnnnnnnnnnnnnnnnnnnnnnnnnnnnnnnnnnnnnnnnnnnnnnnnnnnnnnnnnnnnnnnnnnnnnnnnnnnnnnnnnnnnnnnnnnnnnnnnnnnnnnnnnnnnnnnnnnnnnnnnnnnnnnnnnnnnnnnnnnnnnnnnnnnnnnnnnnnnnnnnnnnnnnnnnnnnnnnnnnnnnnnnnnnnnnnnnnnnnnnnnnnnnnnnnnnnnnnnnnnnnnnnnnnnnnnnnnnnnnnnnnnnnnnnnnnnnnnnnnnnnnnnnnnnnnnnnnnnnnnnnnnnnnnnnnnnnnnnnnnnnnnnnnnnnnnnnnnnnnnnnnnnnnnnnnnnnnnnnnnnnnnnnnnnnnnnnnnnnnnnnnnnnnnnnnnnnnnnnnnnnnnnnnnnnnnnnnnnnnnnnnnnnnnnnnnnnnnnnnnnnnnnnnnnnnnnnnnnnnnnnnnnnnnnnnnnnnnnnnnnnnnnnnnnnnnnnnnnnnnnnnnnnnnnnnnnnnnnnnnnnnnnnnnnnnnnnnnnnnnnnnnnnnnnnnnnnnnnnnnnnnnnnnnnnnnnnnnnnnnnnnnnnnnnnnnnnnnnnnnnnnnnnnnnnnnnnnnnnnnnnnnnnnnnnnnnnnnnnnnnnnnnnnnnnnnnnnnnnnnnnnnnnnnnnnnnnnnnnnnnnnnnnnnnnnnnnnnnnnnnnnnnnnnnnnnnnnnnnnnnnnnnnnnnnnnnnnnnnnnnnnnnnnnnnnnnnnnnnnnnnnnnnnnnnnnnnnnnnnnnnnnnnnnnnnnnnnnnnnnnnnnnnnnnnnnnnnnnnnnnnnnnnnnnnnnnnnnnnnnnnnnnnnnnnnnnnnnnnnnnnnnnnnnnnnnnnnnnnnnnnnnnnnnnnnnnnnnnnnnnnnnnnnnnnnnnnnnnnnnnnnnnnnnnnnnnnnnnnnnnnnnnnnnnnnnnnnnnnnnnnnnnnnnnnnnnnnnnnnnnnnnnnnnnnnnnnnnnnnnnnnnnnnnnnnnnnnnnnnnnnnnnnnnnnnnnnnnnnnnnnnnnnnnnnnnnnnnnnnnnnnnnnnnnnnnnnnnnnnnnnnnnnnnnnnnnnnnnnnnnnnnnnnnnnnnnnnnnnnnnnnnnnnnnnnnnnnnnnnnnnnnnnnnnnnnnnnnnnnnnnnnnnnnnnnnnnnnnnnnnnnnnnnnnnnnnnnnnnnnnnnnnnnnnnnnnnnnnnnnnnnnnnnnnnnnnnnnnnnnnnnnnnnnnnnnnnnnnnnnnnnnnnnnnnnnnnnnnnnnnnnnnnnnnnnnnnnnnnnnnnnnnnnnnnnnnnnnnnnnnnnnnnnnnnnnnnnnnnnnnnnnnnnnnnnnnnnnnnnnnnnnnnnnnnnnnnnnnnnnnnnnnnnnnnnnnnnnnnnnnnnnnnnnnnnnnnnnnnnnnnnnnnnnnnnnnnnnnnnnnnnnnnnnnnnnnnnnnnnnnnnnnnnnnnnnnnnnnnnnnnnnnnnnnnnnnnnnnnnnnnnnnnnnnnnnnnnnnnnnnnnnnnnnnnnnnnnnnnnnnnnnnnnnnnnnnnnnnnnnnnnnnnnnnnnnnnnnnnnnnnnnnnnnnnnnnnnnnnnnnnnnnnnnnnnnnnnnnnnnnnnnnnnnnnnnnnnnnnnnnnnnnnnnnnnnnnnnnnnnnnnnnnnnnnnnnnnnnnnnnnnnnnnnnnnnnnnnnnnnnnnnnnnnnnnnnnnnnnnnnnnnnnnnnnnnnnnnnnnnnnnnnnnnnnnnnnnnnnnnnnnnnnnnnnnnnnnnnnnnnnnnnnnnnnnnnnnnnnnnnnnnnnnnnnnnnnnnnnnnnnnnnnnnnnnnnnnnnnnnnnnnnnnnnnnnnnnnnnnnnnnnnnnnnnnnnnnnnnnnnnnnnnnnnnnnnnnnnnnnnnnnnnnnnnnnnnnnnnnnnnnnnnnnnnnnnnnnnnnnnnnnnnnnnnnnnnnnnnnnnnnnnnnnnnnnnnnnnnnnnnnnnnnnnnnnnnnnnnnnnnnnnnnnnnnnnnnnnnnnnnnnnnnnnnnnnnnnnnnnnnnnnnnnnnnnnnnnnnnnnnnnnnnnnnnnnnnnnnnnnnnnnnnnnnnnnnnnnnnnnnnnnnnnnnnnnnnnnnnnnnnnnnnnnnnnnnnnnnnnnnnnnnnnnnnnnnnnnnnnnnnnnnnnnnnnnnnnnnnnnnnnnnnnnnnnnnnnnnnnnnnnnnnnnnnnnnnnnnnnnnnnnnnnnnnnnnnnnnnnnnnnnnnnnnnnnnnnnnnnnnnnnnnnnnnnnnnnnnnnnnnnnnnnnnnnnnnnnnnnnnnnnnnnnnnnnnnnnnnnnnnnnnnnnnnnnnnnnnnnnnnnnnnnnnnnnnnnnnnnnnnnnnnnnnnnnnnnnnnnnnnnnnnnnnnnnnnnnnnnnnnnnnnnnnnnnnnnnnnnnnnnnnnnnnnnnnnnnnnnnnnnnnnnnnnnnnnnnnnnnnnnnnnnnnnnnnnnnnnnnnnnnnnnnnnnnnnnnnnnnnnnnnnnnnnnnnnnnnnnnnnnnnnnnnnnnnnnnnnnnnnnnnnnnnnnnnnnnnnnnnnnnnnnnnnnnnnnnnnnnnnnnnnnnnnnnnnnnnnnnnnnnnnnnnnnnnnnnnnnnnnnnnnnnnnnnnnnnnnnnnnnnnnnnnnnnnnnnnnnnnnnnnnnnnnnnnnnnnnnnnnnnnnnnnnnnnnnnnnnnnnnnnnnnnnnnnnnnnnnnnnnnnnnnnnnnnnnnnnnnnnnnnnnnnnnnnnnnnnnnnnnnnnnnnnnnnnnnnnnnnnnnnnnnnnnnnnnnnnnnnnnnnnnnnnnnnnnnnnnnnnnnnnnnnnnnnnnnnnnnnnnnnnnnnnnnnnnnnnnnnnnnnnnnnnnnnnnnnnnnnnnnnnnnnnnnnnnnnnnnnnnnnnnnnnnnnnnnnnnnnnnnnnnnnnnnnnnnnnnnnnnnnnnnnnnnnnnnnnnnnnnnnnnnnnnnnnnnnnnnnnnnnnnnnnnnnnnnnnnnnnnnnnnnnnnnnnnnnnnnnnnnnnnnnnnnnnnnnnnnnnnnnnnnnnnnnnnnnnnnnnnnnnnnnnnnnnnnnnnnnnnnnnnnnnnnnnnnnnnnnnnnnnnnnnnnnnnnnnnnnnnnnnnnnnnnnnnnnnnnnnnnnnnnnnnnnnnnnnnnnnnnnnnnnnnnnnnnnnnnnnnnnnnnnnnnnnnnnnnnnnnnnnnnnnnnnnnnnnnnnnnnnnnnnnnnnnnnnnnnnnnnnnnnnnnnnnnnnnnnnnnnnnnnnnnnnnnnnnnnnnnnnnnnnnnnnnnnnnnnnnnnnnnnnnnnnnnnnnnnnnnnnnnnnnnnnnnnnnnnnnnnnnnnnnnnnnnnnnnnnnnnnnnnnnnnnnnnnnnnnnnnnnnnnnnnnnnnnnnnnnnnnnnnnnnnnnnnnnnnnnnnnnnnnnnnnnnnnnnnnnnnnnnnnnnnnnnnnnnnnnnnnnnnnnnnnnnnnnnnnnnnnnnnnnnnnnnnnnnnnnnnnnnnnnnnnnnnnnnnnnnnnnnnnnnnnnnnnnnnnnnnnnnnnnnnnnnnnnnnnnnnnnnnnnnnnnnnnnnnnnnnnnnnnnnnnnnnnnnnnnnnnnnnnnnnnnnnnnnnnnnnnnnnnnnnnnnnnnnnnnnnnnnnnnnnnnnnnnnnnnnnnnnnnnnnnnnnnnnnnnnnnnnnnnnnnnnnnnnnnnnnnnnnnnnnnnnnnnnnnnnnnnnnnnnnnnnnnnnnnnnnnnnnnnnnnnnnnnnnnnnnnnnnnnnnnnnnnnnnnnnnnnnnnnnnnnnnnnnnnnnnnnnnnnnnnnnnnnnnnnnnnnnnnnnnnnnnnnnnnnnnnnnnnnnnnnnnnnnnnnnnnnnnnnnnnnnnnnnnnnnnnnnnnnnnnnnnnnnnnnnnnnnnnnnnnnnnnnnnnnnnnnnnnnnnnnnnnnnnnnnnnnnnnnnnnnnnnnnnnnnnnnnnnnnnnnnnnnnnnnnnnnnnnnnnnnnnnnnnnnnnnnnnnnnnnnnnnnnnnnnnnnnnnnnnnnnnnnnnnnnnnnnnnnnnnnnnnnnnnnnnnnnnnnnnnnnnnnnnnnnnnnnnnnnnnnnnnnnnnnnnnnnnnnnnnnnnnnnnnnnnnnnnnnnnnnnnnnnnnnnnnnnnnnnnnnnnnnnnnnnnnnnnnnnnnnnnnnnnnnnnnnnnnnnnnnnnnnnnnnnnnnnnnnnnnnnnnnnnnnnnnnnnnnnnnnnnnnnnnnnnnnnnnnnnnnnnnnnnnnnnnnnnnnnnnnnnnnnnnnnnnnnnnnnnnnnnnnnnnnnnnnnnnnnnnnnnnnnnnnnnnnnnnnnnnnnnnnnnnnnnnnnnnnnnnnnnnnnnnnnnnnnnnnnnnnnnnnnnnnnnnnnnnnnnnnnnnnnnnnnnnnnnnnnnnnnnnnnnnnnnnnnnnnnnnnnnnnnnnnnnnnnnnnnnnnnnnnnnnnnnnnnnnnnnnnnnnnnnnnnnnnnnnnnnnnnnnnnnnnnnnnnnnnnnnnnnnnnnnnnnnnnnnnnnnnnnnnnnnnnnnnnnnnnnnnnnnnnnnnnnnnnnnnnnnnnnnnnnnnnnnnnnnnnnnnnnnnnnnnnnnnnnnnnnnnnnnnnnnnnnnnnnnnnnnnnnnnnnnnnnnnnnnnnnnnnnnnnnnnnnnnnnnnnnnnnnnnnnnnnnnnnnnnnnnnnnnnnnnnnnnnnnnnnnnnnnnnnnnnnnnnnnnnnnnnnnnnnnnnnnnnnnnnnnnnnnnnnnnnnnnnnnnnnnnnnnnnnnnnnnnnnnnnnnnnnnnnnnnnnnnnnnnnnnnnnnnnnnnnnnnnnnnnnnnnnnnnnnnnnnnnnnnnnnnnnnnnnnnnnnnnnnnnnnnnnnnnnnnnnnnnnnnnnnnnnnnnnnnnnnnnnnnnnnnnnnnnnnnnnnnnnnnnnnnnnnnnnnnnnnnnnnnnnnnnnnnnnnnnnnnnnnnnnnnnnnnnnnnnnnnnnnnnnnnnnnnnnnnnnnnnnnnnnnnnnnnnnnnnnnnnnnnnnnnnnnnnnnnnnnnnnnnnnnnnnnnnnnnnnnnnnnnnnnnnnnnnnnnnnnnnnnnnnnnnnnnnnnnnnnnnnnnnnnnnnnnnnnnnnnnnnnnnnnnnnnnnnnnnnnnnnnnnnnnnnnnnnnnnnnnnnnnnnnnnnnnnnnnnnnnnnnnnnnnnnnnnnnnnnnnnnnnnnnnnnnnnnnnnnnnnnnnnnnnnnnnnnnnnnnnnnnnnnnnnnnnnnnnnnnnnnnnnnnnnnnnnnnnnnnnnnnnnnnnnnnnnnnnnnnnnnnnnnnnnnnnnnnnnnnnnnnnnnnnnnnnnnnnnnnnnnnnnnnnnnnnnnnnnnnnnnnnnnnnnnnnnnnnnnnnnnnnnnnnnnnnnnnnnnnnnnnnnnnnnnnnnnnnnnnnnnnnnnnnnnnnnnnnnnnnnnnnnnnnnnnnnnnnnnnnnnnnnnnnnnnnnnnnnnnnnnnnnnnnnnnnnnnnnnnnnnnnnnnnnnnnnnnnnnnnnnnnnnnnnnnnnnnnnnnnnnnnnnnnnnnnnnnnnnnnnnnnnnnnnnnnnnnnnnnnnnnnnnnnnnnnnnnnnnnnnnnnnnnnnnnnnnnnnnnnnnnnnnnnnnnnnnnnnnnnnnnnnnnnnnnnnnnnnnnnnnnnnnnnnnnnnnnnnnnnnnnnnnnnnnnnnnnnnnnnnnnnnnnnnnnnnnnnnnnnnnnnnnnnnnnnnnnnnnnnnnnnnnnnnnnnnnnnnnnnnnnnnnnnnnnnnnnnnnnnnnnnnnnnnnnnnnnnnnnnnnnnnnnnnnnnnnnnnnnnnnnnnnnnnnnnnnnnnnnnnnnnnnnnnnnnnnnnnnnnnnnnnnnnnnnnnnnnnnnnnnnnnnnnnnnnnnnnnnnnnnnnnnnnnnnnnnnnnnnnnnnnnnnnnnnnnnnnnnnnnnnnnnnnnnnnnnnnnnnnnnnnnnnnnnnnnnnnnnnnnnnnnnnnnnnnnnnnnnnnnnnnnnnnnnnnnnnnnnnnnnnnnnnnnnnnnnnnnnnnnnnnnnnnnnnnnnnnnnnnnnnnnnnnnnnnnnnnnnnnnnnnnnnnnnnnnnnnnnnnnnnnnnnnnnnnnnnnnnnnnnnnnnnnnnnnnnnnnnnnnnnnnnnnnnnnnnnnnnnnnnnnnnnnnnnnnnnnnnnnnnnnnnnnnnnnnnnnnnnnnnnnnnnnnnnnnnnnnnnnnnnnnnnnnnnnnnnnnnnnnnnnnnnnnnnnnnnnnnnnnnnnnnnnnnnnnnnnnnnnnnnnnnnnnnnnnnnnnnnnnnnnnnnnnnnnnnnnnnnnnnnnnnnnnnnnnnnnnnnnnnnnnnnnnnnnnnnnnnnnnnnnnnnnnnnnnnnnnnnnnnnnnnnnnnnnnnnnnnnnnnnnnnnnnnnnnnnnnnnnnnnnnnnnnnnnnnnnnnnnnnnnnnnnnnnnnnnnnnnnnnnnnnnnnnnnnnnnnnnnnnnnnnnnnnnnnnnnnnnnnnnnnnnnnnnnnnnnnnnnnnnnnnnnnnnnnnnnnnnnnnnnnnnnnnnnnnnnnnnnnnnnnnnnnnnnnnnnnnnnnnnnnnnnnnnnnnnnnnnnnnnnnnnnnnnnnnnnnnnnnnnnnnnnnnnnnnnnnnnnnnnnnnnnnnnnnnnnnnnnnnnnnnnnnnnnnnnnnnnnnnnnnnnnnnnnnnnnnnnnnnnnnnnnnnnnnnnnnnnnnnnnnnnnnnnnnnnnnnnnnnnnnnnnnnnnnnnnnnnnnnnnnnnnnnnnnnnnnnnnnnnnnnnnnnnnnnnnnnnnnnnnnnnnnnnnnnnnnnnnnnnnnnnnnnnnnnnnnnnnnnnnnnnnnnnnnnnnnnnnnnnnnnnnnnnnnnnnnnnnnnnnnnnnnnnnnnnnnnnnnnnnnnnnnnnnnnnnnnnnnnnnnnnnnnnnnnnnnnnnnnnnnnnnnnnnnnnnnnnnnnnnnnnnnnnnnnnnnnnnnnnnnnnnnnnnnnnnnnnnnnnnnnnnnnnnnnnnnnnnnnnnnnnnnnnnnnnnnnnnnnnnnnnnnnnnnnnnnnnnnnnnnnnnnnnnnnnnnnnnnnnnnnnnnnnnnnnnnnnnnnnnnnnnnnnnnnnnnnnnnnnnnnnnnnnnnnnnnnnnnnnnnnnnnnnnnnnnnnnnnnnnnnnnnnnnnnnnnnnnnnnnnnnnnnnnnnnnnnnnnnnnnnnnnnnnnnnnnnnnnnnnnnnnnnnnnnnnnnnnnnnnnnnnnnnnnnnnnnnnnnnnnnnnnnnnnnnnnnnnnnnnnnnnnnnnnnnnnnnnnnnnnnnnnnnnnnnnnnnnnnnnnnnnnnnnnnnnnnnnnnnnnnnnnnnnnnnnnnnnnnnnnnnnnnnnnnnnnnnnnnnnnnnnnnnnnnnnnnnnnnnnnnnnnnnnnnnnnnnnnnnnnnnnnnnnnnnnnnnnnnnnnnnnnnnnnnnnnnnnnnnnnnnnnnnnnnnnnnnnnnnnnnnnnnnnnnnnnnnnnnnnnnnnnnnnnnnnnnnnnnnnnnnnnnnnnnnnnnnnnnnnnnnnnnnnnnnnnnnnnnnnnnnnnnnnnnnnnnnnnnnnnnnnnnnnnnnnnnnnnnnnnnnnnnnnnnnnnnnnnnnnnnnnnnnnnnnnnnnnnnnnnnnnnnnnnnnnnnnnnnnnnnnnnnnnnnnnnnnnnnnnnnnnnnnnnnnnnnnnnnnnnnnnnnnnnnnnnnnnnnnnnnnnnnnnnnnnnnnnnnnnnnnnnnnnnnnnnnnnnnnnnnnnnnnnnnnnnnnnnnnnnnnnnnnnnnnnnnnnnnnnnnnnnnnnnnnnnnnnnnnnnnnnnnnnnnnnnnnnnnnnnnnnnnnnnnnnnnnnnnnnnnnnnnnnnnnnnnnnnnnnnnnnnnnnnnnnnnnnnnnnnnnnnnnnnnnnnnnnnnnnnnnnnnnnnnnnnnnnnnnnnnnnnnnnnnnnnnnnnnnnnnnnnnnnnnnnnnnnnnnnnnnnnnnnnnnnnnnnnnnnnnnnnnnnnnnnnnnnnnnnnnnnnnnnnnnnnnnnnnnnnnnnnnnnnnnnnnnnnnnnnnnnnnnnnnnnnnnnnnnnnnnnnnnnnnnnnnnnnnnnnnnnnnnnnnnnnnnnnnnnnnnnnnnnnnnnnnnnnnnnnnnnnnnnnnnnnnnnnnnnnnnnnnnnnnnnnnnnnnnnnnnnnnnnnnnnnnnnnnnnnnnnnnnnnnnnnnnnnnnnnnnnnnnnnnnnnnnnnnnnnnnnnnnnnnnnnnnnnnnnnnnnnnnnnnnnnnnnnnnnnnnnnnnnnnnnnnnnnnnnnnnnnnnnnnnnnnnnnnnnnnnnnnnnnnnnnnnnnnnnnnnnnnnnnnnnnnnnnnnnnnnnnnnnnnnnnnnnnnnnnnnnnnnnnnnnnnnnnnnnnnnnnnnnnnnnnnnnnnnnnnnnnnnnnnnnnnnnnnnnnnnnnnnnnnnnnnnnnnnnnnnnnnnnnnnnnnnnnnnnnnnnnnnnnnnnnnnnnnnnnnnnnnnnnnnnnnnnnnnnnnnnnnnnnnnnnnnnnnnnnnnnnnnnnnnnnnnnnnnnnnnnnnnnnnnnnnnnnnnnnnnnnnnnnnnnnnnnnnnnnnnnnnnnnnnnnnnnnnnnnnnnnnnnnnnnnnnnnnnnnnnnnnnnnnnnnnnnnnnnnnnnnnnnnnnnnnnnnnnnnnnnnnnnnnnnnnnnnnnnnnnnnnnnnnnnnnnnnnnnnnnnnnnnnnnnnnnnnnnnnnnnnnnnnnnnnnnnnnnnnnnnnnnnnnnnnnnnnnnnnnnnnnnnnnnnnnnnnnnnnnnnnnnnnnnnnnnnnnnnnnnnnnnnnnnnnnnnnnnnnnnnnnnnnnnnnnnnnnnnnnnnnnnnnnnnnnnnnnnnnnnnnnnnnnnnnnnnnnnnnnnnnnnnnnnnnnnnnnnnnnnnnnnnnnnnnnnnnnnnnnnnnnnnnnnnnnnnnnnnnnnnnnnnnnnnnnnnnnnnnnnnnnnnnnnnnnnnnnnnnnnnnnnnnnnnnnnnnnnnnnnnnnnnnnnnnnnnnnnnnnnnnnnnnnnnnnnnnnnnnnnnnnnnnnnnnnnnnnnnnnnnnnnnnnnnnnnnnnnnnnnnnnnnnnnnnnnnnnnnnnnnnnnnnnnnnnnnnnnnnnnnnnnnnnnnnnnnnnnnnnnnnnnnnnnnnnnnnnnnnnnnnnnnnnnnnnnnnnnnnnnnnnnnnnnnnnnnnnnnnnnnnnnnnnnnnnnnnnnnnnnnnnnnnnnnnnnnnnnnnnnnnnnnnnnnnnnnnnnnnnnnnnnnnnnnnnnnnnnnnnnnnnnnnnnnnnnnnnnnnnnnnnnnnnnnnnnnnnnnnnnnnnnnnnnnnnnnnnnnnnnnnnnnnnnnnnnnnnnnnnnnnnnnnnnnnnnnnnnnnnnnnnnnnnnnnnnnnnnnnnnnnnnnnnnnnnnnnnnnnnnnnnnnnnnnnnnnnnnnnnnnnnnnnnnnnnnnnnnnnnnnnnnnnnnnnnnnnnnnnnnnnnnnnnnnnnnnnnnnnnnnnnnnnnnnnnnnnnnnnnnnnnnnnnnnnnnnnnnnnnnnnnnnnnnnnnnnnnnnnnnnnnnnnnnnnnnnnnnnnnnnnnnnnnnnnnnnnnnnnnnnnnnnnnnnnnnnnnnnnnnnnnnnnnnnnnnnnnnnnnnnnnnnnnnnnnnnnnnnnnnnnnnnnnnnnnnnnnnnnnnnnnnnnnnnnnnnnnnnnnnnnnnnnnnnnnnnnnnnnnnnnnnnnnnnnnnnnnnnnnnnnnnnnnnnnnnnnnnnnnnnnnnnnnnnnnnnnnnnnnnnnnnnnnnnnnnnnnnnnnnnnnnnnnnnnnnnnnnnnnnnnnnnnnnnnnnnnnnnnnnnnnnnnnnnnnnnnnnnnnnnnnnnnnnnnnnnnnnnnnnnnnnnnnnnnnnnnnnnnnnnnnnnnnnnnnnnnnnnnnnnnnnnnnnnnnnnnnnnnnnnnnnnnnnnnnnnnnnnnnnnnnnnnnnnnnnnnnnnnnnnnnnnnnnnnnnnnnnnnnnnnnnnnnnnnnnnnnnnnnnnnnnnnnnnnnnnnnnnnnnnnnnnnnnnnnnnnnnnnnnnnnnnnnnnnnnnnnnnnnnnnnnnnnnnnnnnnnnnnnnnnnnnnnnnnnnnnnnnnnnnnnnnnnnnnnnnnnnnnnnnnnnnnnnnnnnnnnnnnnnnnnnnnnnnnnnnnnnnnnnnnnnnnnnnnnnnnnnnnnnnnnnnnnnnnnnnnnnnnnnnnnnnnnnnnnnnnnnnnnnnnnnnnnnnnnnnnnnnnnnnnnnnnnnnnnnnnnnnnnnnnnnnnnnnnnnnnnnnnnnnnnnnnnnnnnnnnnnnnnnnnnnnnnnnnnnnnnnnnnnnnnnnnnnnnnnnnnnnnnnnnnnnnnnnnnnnnnnnnnnnnnnnnnnnnnnnnnnnnnnnnnnnnnnnnnnnnnnnnnnnnnnnnnnnnnnnnnnnnnnnnnnnnnnnnnnnnnnnnnnnnnnnnnnnnnnnnnnnnnnnnnnnnnnnnnnnnnnnnnnnnnnnnnnnnnnnnnnnnnnnnnnnnnnnnnnnnnnnnnnnnnnnnnnnnnnnnnnnnnnnnnnnnnnnnnnnnnnnnnnnnnnnnnnnnnnnnnnnnnnnnnnnnnnnnnnnnnnnnnnnnnnnnnnnnnnnnnnnnnnnnnnnnnnnnnnnnnnnnnnnnnnnnnnnnnnnnnnnnnnnnnnnnnnnnnnnnnnnnnnnnnnnnnnnnnnnnnnnnnnnnnnnnnnnnnnnnnnnnnnnnnnnnnnnnnnnnnnnnnnnnnnnnnnnnnnnnnnnnnnnnnnnnnnnnnnnnnnnnnnnnnnnnnnnnnnnnnnnnnnnnnnnnnnnnnnnnnnnnnnnnnnnnnnnnnnnnnnnnnnnnnnnnnnnnnnnnnnnnnnnnnnnnnnnnnnnnnnnnnnnnnnnnnnnnnnnnnnnnnnnnnnnnnnnnnnnnnnnnnnnnnnnnnnnnnnnnnnnnnnnnnnnnnnnnnnnnnnnnnnnnnnnnnnnnnnnnnnnnnnnnnnnnnnnnnnnnnnnnnnnnnnnnnnnnnnnnnnnnnnnnnnnnnnnnnnnnnnnnnnnnnnnnnnnnnnnnnnnnnnnnnnnnnnnnnnnnnnnnnnnnnnnnnnnnnnnnnnnnnnnnnnnnnnnnnnnnnnnnnnnnnnnnnnnnnnnnnnnnnnnnnnnnnnnnnnnnnnnnnnnnnnnnnnnnnnnnnnnnnnnnnnnnnnnnnnnnnnnnnnnnnnnnnnnnnnnnnnnnnnnnnnnnnnnnnnnnnnnnnnnnnnnnnnnnnnnnnnnnnnnnnnnnnnnnnnnnnnnnnnnnnnnnnnnnnnnnnnnnnnnnnnnnnnnnnnnnnnnnnnnnnnnnnnnnnnnnnnnnnnnnnnnnnnnnnnnnnnnnnnnnnnnnnnnnnnnnnnnnnnnnnnnnnnnnnnnnnnnnnnnnnnnnnnnnnnnnnnnnnnnnnnnnnnnnnnnnnnnnnnnnnnnnnnnnnnnnnnnnnnnnnnnnnnnnnnnnnnnnnnnnnnnnnnnnnnnnnnnnnnnnnnnnnnnnnnnnnnnnnnnnnnnnnnnnnnnnnnnnnnnnnnnnnnnnnnnnnnnnnnnnnnnnnnnnnnnnnnnnnnnnnnnnnnnnnnnnnnnnnnnnnnnnnnnnnnnnnnnnnnnnnnnnnnnnnnnnnnnnnnnnnnnnnnnnnnnnnnnnnnnnnnnnnnnnnnnnnnnnnnnnnnnnnnnnnnnnnnnnnnnnnnnnnnnnnnnnnnnnnnnnnnnnnnnnnnnnnnnnnnnnnnnnnnnnnnnnnnnnnnnnnnnnnnnnnnnnnnnnnnnnnnnnnnnnnnnnnnnnnnnnnnnnnnnnnnnnnnnnnnnnnnnnnnnnnnnnnnnnnnnnnnnnnnnnnnnnnnnnnnnnnnnnnnnnnnnnnnnnnnnnnnnnnnnnnnnnnnnnnnnnnnnnnnnnnnnnnnnnnnnnnnnnnnnnnnnnnnnnnnnnnnnnnnnnnnnnnnnnnnnnnnnnnnnnnnnnnnnnnnnnnnnnnnnnnnnnnnnnnnnnnnnnnnnnnnnnnnnnnnnnnnnnnnnnnnnnnnnnnnnnnnnnnnnnnnnnnnnnnnnnnnnnnnnnnnnnnnnnnnnnnnnnnnnnnnnnnnnnnnnnnnnnnnnnnnnnnnnnnnnnnnnnnnnnnnnnnnnnnnnnnnnnnnnnnnnnnnnnnnnnnnnnnnnnnnnnnnnnnnnnnnnnnnnnnnnnnnnnnnnnnnnnnnnnnnnnnnnnnnnnnnnnnnnnnnnnnnnnnnnnnnnnnnnnnnnnnnnnnnnnnnnnnnnnnnnnnnnnnnnnnnnnnnnnnnnnnnnnnnnnnnnnnnnnnnnnnnnnnnnnnnnnnnnnnnnnnnnnnnnnnnnnnnnnnnnnnnnnnnnnnnnnnnnnnnnnnnnnnnnnnnnnnnnnnnnnnnnnnnnnnnnnnnnnnnnnnnnnnnnnnnnnnnnnnnnnnnnnnnnnnnnnnnnnnnnnnnnnnnnnnnnnnnnnnnnnnnnnnnnnnnnnnnnnnnnnnnnnnnnnnnnnnnnnnnnnnnnnnnnnnnnnnnnnnnnnnnnnnnnnnnnnnnnnnnnnnnnnnnnnnnnnnnnnnnnnnnnnnnnnnnnnnnnnnnnnnnnnnnnnnnnnnnnnnnnnnnnnnnnnnnnnnnnnnnnnnnnnnnnnnnnnnnnnnnnnnnnnnnnnnnnnnnnnnnnnnnnnnnnnnnnnnnnnnnnnnnnnnnnnnnnnnnnnnnnnnnnnnnnnnnnnnnnnnnnnnnnnnnnnnnnnnnnnnnnnnnnnnnnnnnnnnnnnnnnnnnnnnnnnnnnnnnnnnnnnnnnnnnnnnnnnnnnnnnnnnnnnnnnnnnnnnnnnnnnnnnnnnnnnnnnnnnnnnnnnnnnnnnnnnnnnnnnnnnnnnnnnnnnnnnnnnnnnnnnnnnnnnnnnnnnnnnnnnnnnnnnnnnnnnnnnnnnnnnnnnnnnnnnnnnnnnnnnnnnnnnnnnnnnnnnnnnnnnnnnnnnnnnnnnnnnnnnnnnnnnnnnnnnnnnnnnnnnnnnnnnnnnnnnnnnnnnnnnnnnnnnnnnnnnnnnnnnnnnnnnnnnnnnnnnnnnnnnnnnnnnnnnnnnnnnnnnnnnnnnnnnnnnnnnnnnnnnnnnnnnnnnnnnnnnnnnnnnnnnnnnnnnnnnnnnnnnnnnnnnnnnnnnnnnnnnnnnnnnnnnnnnnnnnnnnnnnnnnnnnnnnnnnnnnnnnnnnnnnnnnnnnnnnnnnnnnnnnnnnnnnnnnnnnnnnnnnnnnnnnnnnnnnnnnnnnnnnnnnnnnnnnnnnnnnnnnnnnnnnnnnnnnnnnnnnnnnnnnnnnnnnnnnnnnnnnnnnnnnnnnnnnnnnnnnnnnnnnnnnnnnnnnnnnnnnnnnnnnnnnnnnnnnnnnnnnnnnnnnnnnnnnnnnnnnnnnnnnnnnnnnnnnnnnnnnnnnnnnnnnnnnnnnnnnnnnnnnnnnnnnnnnnnnnnnnnnnnnnnnnnnnnnnnnnnnnnnnnnnnnnnnnnnnnnnnnnnnnnnnnnnnnnnnnnnnnnnnnnnnnnnnnnnnnnnnnnnnnnnnnnnnnnnnnnnnnnnnnnnnnnnnnnnnnnnnnnnnnnnnnnnnnnnnnnnnnnnnnnnnnnnnnnnnnnnnnnnnnnnnnnnnnnnnnnnnnnnnnnnnnnnnnnnnnnnnnnnnnnnnnnnnnnnnnnnnnnnnnnnnnnnnnnnnnnnnnnnnnnnnnnnnnnnnnnnnnnnnnnnnnnnnnnnnnnnnnnnnnnnnnnnnnnnnnnnnnnnnnnnnnnnnnnnnnnnnnnnnnnnnnnnnnnnnnnnnnnnnnnnnnnnnnnnnnnnnnnnnnnnnnnnnnnnnnnnnnnnnnnnnnnnnnnnnnnnnnnnnnnnnnnnnnnnnnnnnnnnnnnnnnnnnnnnnnnnnnnnnnnnnnnnnnnnnnnnnnnnnnnnnnnnnnnnnnnnnnnnnnnnnnnnnnnnnnnnnnnnnnnnnnnnnnnnnnnnnnnnnnnnnnnnnnnnnnnnnnnnnnnnnnnnnnnnnnnnnnnnnnnnnnnnnnnnnnnnnnnnnnnnnnnnnnnnnnnnnnnnnnnnnnnnnnnnnnnnnnnnnnnnnnnnnnnnnnnnnnnnnnnnnnnnnnnnnnnnnnnnnnnnnnnnnnnnnnnnnnnnnnnnnnnnnnnnnnnnnnnnnnnnnnnnnnnnnnnnnnnnnnnnnnnnnnnnnnnnnnnnnnnnnnnnnnnnnnnnnnnnnnnnnnnnnnnnnnnnnnnnnnnnnnnnnnnnnnnnnnnnnnnnnnnnnnnnnnnnnnnnnnnnnnnnnnnnnnnnnnnnnnnnnnnnnnnnnnnnnnnnnnnnnnnnnnnnnnnnnnnnnnnnnnnnnnnnnnnnnnnnnnnnnnnnnnnnnnnnnnnnnnnnnnnnnnnnnnnnnnnnnnnnnnnnnnnnnnnnnnnnnnnnnnnnnnnnnnnnnnnnnnnnnnnnnnnnnnnnnnnnnnnnnnnnnnnnnnnnnnnnnnnnnnnnnnnnnnnnnnnnnnnnnnnnnnnnnnnnnnnnnnnnnnnnnnnnnnnnnnnnnnnnnnnnnnnnnnnnnnnnnnnnnnnnnnnnnnnnnnnnnnnnnnnnnnnnnnnnnnnnnnnnnnnnnnnnnnnnnnnnnnnnnnnnnnnnnnnnnnnnnnnnnnnnnnnnnnnnnnnnnnnnnnnnnnnnnnnnnnnnnnnnnnnnnnnnnnnnnnnnnnnnnnnnnnnnnnnnnnnnnnnnnnnnnnnnnnnnnnnnnnnnnnnnnnnnnnnnnnnnnnnnnnnnnnnnnnnnnnnnnnnnnnnnnnnnnnnnnnnnnnnnnnnnnnnnnnnnnnnnnnnnnnnnnnnnnnnnnnnnnnnnnnnnnnnnnnnnnnnnnnnnnnnnnnnnnnnnnnnnnnnnnnnnnnnnnnnnnnnnnnnnnnnnnnnnnnnnnnnnnnnnnnnnnnnnnnnnnnnnnnnnnnnnnnnnnnnnnnnnnnnnnnnnnnnnnnnnnnnnnnnnnnnnnnnnnnnnnnnnnnnnnnnnnnnnnnnnnnnnnnnnnnnnnnnnnnnnnnnnnnnnnnnnnnnnnnnnnnnnnnnnnnnnnnnnnnnnnnnnnnnnnnnnnnnnnnnnnnnnnnnnnnnnnnnnnnnnnnnnnnnnnnnnnnnnnnnnnnnnnnnnnnnnnnnnnnnnnnnnnnnnnnnnnnnnnnnnnnnnnnnnnnnnnnnnnnnnnnnnnnnnnnnnnnnnnnnnnnnnnnnnnnnnnnnnnnnnnnnnnnnnnnnnnnnnnnnnnnnnnnnnnnnnnnnnnnnnnnnnnnnnnnnnnnnnnnnnnnnnnnnnnnnnnnnnnnnnnnnnnnnnnnnnnnnnnnnnnnnnnnnnnnnnnnnnnnnnnnnnnnnnnnnnnnnnnnnnnnnnnnnnnnnnnnnnnnnnnnnnnnnnnnnnnnnnnnnnnnnnnnnnnnnnnnnnnnnnnnnnnnnnnnnnnnnnnnnnnnnnnnnnnnnnnnnnnnnnnnnnnnnnnnnnnnnnnnnnnnnnnnnnnnnnnnnnnnnnnnnnnnnnnnnnnnnnnnnnnnnnnnnnnnnnnnnnnnnnnnnnnnnnnnnnnnnnnnnnnnnnnnnnnnnnnnnnnnnnnnnnnnnnnnnnnnnnnnnnnnnnnnnnnnnnnnnnnnnnnnnnnnnnnnnnnnnnnnnnnnnnnnnnnnnnnnnnnnnnnnnnnnnnnnnnnnnnnnnnnnnnnnnnnnnnnnnnnnnnnnnnnnnnnnnnnnnnnnnnnnnnnnnnnnnnnnnnnnnnnnnnnnnnnnnnnnnnnnnnnnnnnnnnnnnnnnnnnnnnnnnnnnnnnnnnnnnnnnnnnnnnnnnnnnnnnnnnnnnnnnnnnnnnnnnnnnnnnnnnnnnnnnnnnnnnnnnnnnnnnnnnnnnnnnnnnnnnnnnnnnnnnnnnnnnnnnnnnnnnnnnnnnnnnnnnnnnnnnnnnnnnnnnnnnnnnnnnnnnnnnnnnnnnnnnnnnnnnnnnnnnnnnnnnnnnnnnnnnnnnnnnnnnnnnnnnnnnnnnnnnnnnnnnnnnnnnnnnnnnnnnnnnnnnnnnnnnnnnnnnnnnnnnnnnnnnnnnnnnnnnnnnnnnnnnnnnnnnnnnnnnnnnnnnnnnnnnnnnnnnnnnnnnnnnnnnnnnnnnnnnnnnnnnnnnnnnnnnnnnnnnnnnnnnnnnnnnnnnnnnnnnnnnnnnnnnnnnnnnnnnnnnnnnnnnnnnnnnnnnnnnnnnnnnnnnnnnnnnnnnnnnnnnnnnnnnnnnnnnnnnnnnnnnnnnnnnnnnnnnnnnnnnnnnnnnnnnnnnnnnnnnnnnnnnnnnnnnnnnnnnnnnnnnnnnnnnnnnnnnnnnnnnnnnnnnnnnnnnnnnnnnnnnnnnnnnnnnnnnnnnnnnnnnnnnnnnnnnnnnnnnnnnnnnnnnnnnnnnnnnnnnnnnnnnnnnnnnnnnnnnnnnnnnnnnnnnnnnnnnnnnnnnnnnnnnnnnnnnnnnnnnnnnnnnnnnnnnnnnnnnnnnnnnnnnnnnnnnnnnnnnnnnnnnnnnnnnnnnnnnnnnnnnnnnnnnnnnnnnnnnnnnnnnnnnnnnnnnnnnnnnnnnnnnnnnnnnnnnnnnnnnnnnnnnnnnnnnnnnnnnnnnnnnnnnnnnnnnnnnnnnnnnnnnnnnnnnnnnnnnnnnnnnnnnnnnnnnnnnnnnnnnnnnnnnnnnnnnnnnnnnnnnnnnnnnnnnnnnnnnnnnnnnnnnnnnnnnnnnnnnnnnnnnnnnnnnnnnnnnnnnnnnnnnnnnnnnnnnnnnnnnnnnnnnnnnnnnnnnnnnnnnnnnnnnnnnnnnnnnnnnnnnnnnnnnnnnnnnnnnnnnnnnnnnnnnnnnnnnnnnnnnnnnnnnnnnnnnnnnnnnnnnnnnnnnnnnnnnnnnnnnnnnnnnnnnnnnnnnnnnnnnnnnnnnnnnnnnnnnnnnnnnnnnnnnnnnnnnnnnnnnnnnnnnnnnnnnnnnnnnnnnnnnnnnnnnnnnnnnnnnnnnnnnnnnnnnnnnnnnnnnnnnnnnnnnnnnnnnnnnnnnnnnnnnnnnnnnnnnnnnnnnnnnnnnnnnnnnnnnnnnnnnnnnnnnnnnnnnnnnnnnnnnnnnnnnnnnnnnnnnnnnnnnnnnnnnnnnnnnnnnnnnnnnnnnnnnnnnnnnnnnnnnnnnnnnnnnnnnnnnnnnnnnnnnnnnnnnnnnnnnnnnnnnnnnnnnnnnnnnnnnnnnnnnnnnnnnnnnnnnnnnnnnnnnnnnnnnnnnnnnnnnnnnnnnnnnnnnnnnnnnnnnnnnnnnnnnnnnnnnnnnnnnnnnnnnnnnnnnnnnnnnnnnnnnnnnnnnnnnnnnnnnnnnnnnnnnnnnnnnnnnnnnnnnnnnnnnnnnnnnnnnnnnnnnnnnnnnnnnnnnnnnnnnnnnnnnnnnnnnnnnnnnnnnnnnnnnnnnnnnnnnnnnnnnnnnnnnnnnnnnnnnnnnnnnnnnnnnnnnnnnnnnnnnnnnnnnnnnnnnnnnnnnnnnnnnnnnnnnnnnnnnnnnnnnnnnnnnnnnnnnnnnnnnnnnnnnnnnnnnnnnnnnnnnnnnnnnnnnnnnnnnnnnnnnnnnnnnnnnnnnnnnnnnnnnnnnnnnnnnnnnnnnnnnnnnnnnnnnnnnnnnnnnnnnnnnnnnnnnnnnnnnnnnnnnnnnnnnnnnnnnnnnnnnnnnnnnnnnnnnnnnnnnnnnnnnnnnnnnnnnnnnnnnnnnnnnnnnnnnnnnnnnnnnnnnnnnnnnnnnnnnnnnnnnnnnnnnnnnnnnnnnnnnnnnnnnnnnnnnnnnnnnnnnnnnnnnnnnnnnnnnnnnnnnnnnnnnnnnnnnnnnnnnnnnnnnnnnnnnnnnnnnnnnnnnnnnnnnnnnnnnnnnnnnnnnnnnnnnnnnnnnnnnnnnnnnnnnnnnnnnnnnnnnnnnnnnnnnnnnnnnnnnnnnnnnnnnnnnnnnnnnnnnnnnnnnnnnnnnnnnnnnnnnnnnnnnnnnnnnnnnnnnnnnnnnnnnnnnnnnnnnnnnnnnnnnnnnnnnnnnnnnnnnnnnnnnnnnnnnnnnnnnnnnnnnnnnnnnnnnnnnnnnnnnnnnnnnnnnnnnnnnnnnnnnnnnnnnnnnnnnnnnnnnnnnnnnnnnnnnnnnnnnnnnnnnnnnnnnnnnnnnnnnnnnnnnnnnnnnnnnnnnnnnnnnnnnnnnnnnnnnnnnnnnnnnnnnnnnnnnnnnnnnnnnnnnnnnnnnnnnnnnnnnnnnnnnnnnnnnnnnnnnnnnnnnnnnnnnnnnnnnnnnnnnnnnnnnnnnnnnnnnnnnnnnnnnnnnnnnnnnnnnnnnnnnnnnnnnnnnnnnnnnnnnnnnnnnnnnnnnnnnnnnnnnnnnnnnnnnnnnnnnnnnnnnnnnnnnnnnnnnnnnnnnnnnnnnnnnnnnnnnnnnnnnnnnnnnnnnnnnnnnnnnnnnnnnnnnnnnnnnnnnnnnnnnnnnnnnnnnnnnnnnnnnnnnnnnnnnnnnnnnnnnnnnnnnnnnnnnnnnnnnnnnnnnnnnnnnnnnnnnnnnnnnnnnnnnnnnnnnnnnnnnnnnnnnnnnnnnnnnnnnnnnnnnnnnnnnnnnnnnnnnnnnnnnnnnnnnnnnnnnnnnnnnnnnnnnnnnnnnnnnnnnnnnnnnnnnnnnnnnnnnnnnnnnnnnnnnnnnnnnnnnnnnnnnnnnnnnnnnnnnnnnnnnnnnnnnnnnnnnnnnnnnnnnnnnnnnnnnnnnnnnnnnnnnnnnnnnnnnnnnnnnnnnnnnnnnnnnnnnnnnnnnnnnnnnnnnnnnnnnnnnnnnnnnnnnnnnnnnnnnnnnnnnnnnnnnnnnnnnnnnnnnnnnnnnnnnnnnnnnnnnnnnnnnnnnnnnnnnnnnnnnnnnnnnnnnnnnnnnnnnnnnnnnnnnnnnnnnnnnnnnnnnnnnnnnnnnnnnnnnnnnnnnnnnnnnnnnnnnnnnnnnnnnnnnnnnnnnnnnnnnnnnnnnnnnnnnnnnnnnnnnnnnnnnnnnnnnnnnnnnnnnnnnnnnnnnnnnnnnnnnnnnnnnnnnnnnnnnnnnnnnnnnnnnnnnnnnnnnnnnnnnnnnnnnnnnnnnnnnnnnnnnnnnnnnnnnnnnnnnnnnnnnnnnnnnnnnnnnnnnnnnnnnnnnnnnnnnnnnnnnnnnnnnnnnnnnnnnnnnnnnnnnnnnnnnnnnnnnnnnnnnnnnnnnnnnnnnnnnnnnnnnnnnnnnnnnnnnnnnnnnnnnnnnnnnnnnnnnnnnnnnnnnnnnnnnnnnnnnnnnnnnnnnnnnnnnnnnnnnnnnnnnnnnnnnnnnnnnnnnnnnnnnnnnnnnnnnnnnnnnnnnnnnnnnnnnnnnnnnnnnnnnnnnnnnnnnnnnnnnnnnnnnnnnnnnnnnnnnnnnnnnnnnnnnnnnnnnnnnnnnnnnnnnnnnnnnnnnnnnnnnnnnnnnnnnnnnnnnnnnnnnnnnnnnnnnnnnnnnnnnnnnnnnnnnnnnnnnnnnnnnnnnnnnnnnnnnnnnnnnnnnnnnnnnnnnnnnnnnnnnnnnnnnnnnnnnnnnnnnnnnnnnnnnnnnnnnnnnnnnnnnnnnnnnnnnnnnnnnnnnnnnnnnnnnnnnnnnnnnnnnnnnnnnnnnnnnnnnnnnnnnnnnnnnnnnnnnnnnnnnnnnnnnnnnnnnnnnnnnnnnnnnnnnnnnnnnnnnnnnnnnnnnnnnnnnnnnnnnnnnnnnnnnnnnnnnnnnnnnnnnnnnnnnnnnnnnnnnnnnnnnnnnnnnnnnnnnnnnnnnnnnnnnnnnnnnnnnnnnnnnnnnnnnnnnnnnnnnnnnnnnnnnnnnnnnnnnnnnnnnnnnnnnnnnnnnnnnnnnnnnnnnnnnnnnnnnnnnnnnnnnnnnnnnnnnnnnnnnnnnnnnnnnnnnnnnnnnnnnnnnnnnnnnnnnnnnnnnnnnnnnnnnnnnnnnnnnnnnnnnnnnnnnnnnnnnnnnnnnnnnnnnnnnnnnnnnnnnnnnnnnnnnnnnnnnnnnnnnnnnnnnnnnnnnnnnnnnnnnnnnnnnnnnnnnnnnnnnnnnnnnnnnnnnnnnnnnnnnnnnnnnnnnnnnnnnnnnnnnnnnnnnnnnnnnnnnnnnnnnnnnnnnnnnnnnnnnnnnnnnnnnnnnnnnnnnnnnnnnnnnnnnnnnnnnnnnnnnnnnnnnnnnnnnnnnnnnnnnnnnnnnnnnnnnnnnnnnnnnnnnnnnnnnnnnnnnnnnnnnnnnnnnnnnnnnnnnnnnnnnnnnnnnnnnnnnnnnnnnnnnnnnnnnnnnnnnnnnnnnnnnnnnnnnnnnnnnnnnnnnnnnnnnnnnnnnnnnnnnnnnnnnnnnnnnnnnnnnnnnnnnnnnnnnnnnnnnnnnnnnnnnnnnnnnnnnnnnnnnnnnnnnnnnnnnnnnnnnnnnnnnnnnnnnnnnnnnnnnnnnnnnnnnnnnnnnnnnnnnnnnnnnnnnnnnnnnnnnnnnnnnnnnnnnnnnnnnnnnnnnnnnnnnnnnnnnnnnnnnnnnnnnnnnnnnnnnnnnnnnnnnnnnnnnnnnnnnnnnnnnnnnnnnnnnnnnnnnnnnnnnnnnnnnnnnnnnnnnnnnnnnnnnnnnnnnnnnnnnnnnnnnnnnnnnnnnnnnnnnnnnnnnnnnnnnnnnnnnnnnnnnnnnnnnnnnnnnnnnnnnnnnnnnnnnnnnnnnnnnnnnnnnnnnnnnnnnnnnnnnnnnnnnnnnnnnnnnnnnnnnnnnnnnnnnnnnnnnnnnnnnnnnnnnnnnnnnnnnnnnnnnnnnnnnnnnnnnnnnnnnnnnnnnnnnnnnnnnnnnnnnnnnnnnnnnnnnnnnnnnnnnnnnnnnnnnnnnnnnnnnnnnnnnnnnnnnnnnnnnnnnnnnnnnnnnnnnnnnnnnnnnnnnnnnnnnnnnnnnnnnnnnnnnnnnnnnnnnnnnnnnnnnnnnnnnnnnnnnnnnnnnnnnnnnnnnnnnnnnnnnnnnnnnnnnnnnnnnnnnnnnnnnnnnnnnnnnnnnnnnnnnnnnnnnnnnnnnnnnnnnnnnnnnnnnnnnnnnnnnnnnnnnnnnnnnnnnnnnnnnnnnnnnnnnnnnnnnnnnnnnnnnnnnnnnnnnnnnnnnnnnnnnnnnnnnnnnnnnnnnnnnnnnnnnnnnnnnnnnnnnnnnnnnnnnnnnnnnnnnnnnnnnnnnnnnnnnnnnnnnnnnnnnnnnnnnnnnnnnnnnnnnnnnnnnnnnnnnnnnnnnnnnnnnnnnnnnnnnnnnnnnnnnnnnnnnnnnnnnnnnnnnnnnnnnnnnnnnnnnnnnnnnnnnnnnnnnnnnnnnnnnnnnnnnnnnnnnnnnnnnnnnnnnnnnnnnnnnnnnnnnnnnnnnnnnnnnnnnnnnnnnnnnnnnnnnnnnnnnnnnnnnnnnnnnnnnnnnnnnnnnnnnnnnnnnnnnnnnnnnnnnnnnnnnnnnnnnnnnnnnnnnnnnnnnnnnnnnnnnnnnnnnnnnnnnnnnnnnnnnnnnnnnnnnnnnnnnnnnnnnnnnnnnnnnnnnnnnnnnnnnnnnnnnnnnnnnnnnnnnnnnnnnnnnnnnnnnnnnnnnnnnnnnnnnnnnnnnnnnnnnnnnnnnnnnnnnnnnnnnnnnnnnnnnnnnnnnnnnnnnnnnnnnnnnnnnnnnnnnnnnnnnnnnnnnnnnnnnnnnnnnnnnnnnnnnnnnnnnnnnnnnnnnnnnnnnnnnnnnnnnnnnnnnnnnnnnnnnnnnnnnnnnnnnnnnnnnnnnnnnnnnnnnnnnnnnnnnnnnnnnnnnnnnnnnnnnnnnnnnnnnnnnnnnnnnnnnnnnnnnnnnnnnnnnnnnnnnnnnnnnnnnnnnnnnnnnnnnnnnnnnnnnnnnnnnnnnnnnnnnnnnnnnnnnnnnnnnnnnnnnnnnnnnnnnnnnnnnnnnnnnnnnnnnnnnnnnnnnnnnnnnnnnnnnnnnnnnnnnnnnnnnnnnnnnnnnnnnnnnnnnnnnnnnnnnnnnnnnnnnnnnnnnnnnnnnnnnnnnnnnnnnnnnnnnnnnnnnnnnnnnnnnnnnnnnnnnnnnnnnnnnnnnnnnnnnnnnnnnnnnnnnnnnnnnnnnnnnnnnnnnnnnnnnnnnnnnnnnnnnnnnnnnnnnnnnnnnnnnnnnnnnnnnnnnnnnnnnnnnnnnnnnnnnnnnnnnnnnnnnnnnnnnnnnnnnnnnnnnnnnnnnnnnnnnnnnnnnnnnnnnnnnnnnnnnnnnnnnnnnnnnnnnnnnnnnnnnnnnnnnnnnnnnnnnnnnnnnnnnnnnnnnnnnnnnnnnnnnnnnnnnnnnnnnnnnnnnnnnnnnnnnnnnnnnnnnnnnnnnnnnnnnnnnnnnnnnnnnnnnnnnnnnnnnnnnnnnnnnnnnnnnnnnnnnnnnnnnnnnnnnnnnnnnnnnnnnnnnnnnnnnnnnnnnnnnnnnnnnnnnnnnnnnnnnnnnnnnnnnnnnnnnnnnnnnnnnnnnnnnnnnnnnnnnnnnnnnnnnnnnnnnnnnnnnnnnnnnnnnnnnnnnnnnnnnnnnnnnnnnnnnnnnnnnnnnnnnnnnnnnnnnnnnnnnnnnnnnnnnnnnnnnnnnnnnnnnnnnnnnnnnnnnnnnnnnnnnnnnnnnnnnnnnnnnnnnnnnnnnnnnnnnnnnnnnnnnnnnnnnnnnnnnnnnnnnnnnnnnnnnnnnnnnnnnnnnnnnnnnnnnnnnnnnnnnnnnnnnnnnnnnnnnnnnnnnnnnnnnnnnnnnnnnnnnnnnnnnnnnnnnnnnnnnnnnnnnnnnnnnnnnnnnnnnnnnnnnnnnnnnnnnnnnnnnnnnnnnnnnnnnnnnnnnnnnnnnnnnnnnnnnnnnnnnnnnnnnnnnnnnnnnnnnnnnnnnnnnnnnnnnnnnnnnnnnnnnnnnnnnnnnnnnnnnnnnnnnnnnnnnnnnnnnnnnnnnnnnnnnnnnnnnnnnnnnnnnnnnnnnnnnnnnnnnnnnnnnnnnnnnnnnnnnnnnnnnnnnnnnnnnnnnnnnnnnnnnnnnnnnnnnnnnnnnnnnnnnnnnnnnnnnnnnnnnnnnnnnnnnnnnnnnnnnnnnnnnnnnnnnnnnnnnnnnnnnnnnnnnnnnnnnnnnnnnnnnnnnnnnnnnnnnnnnnnnnnnnnnnnnnnnnnnnnnnnnnnnnnnnnnnnnnnnnnnnnnnnnnnnnnnnnnnnnnnnnnnnnnnnnnnnnnnnnnnnnnnnnnnnnnnnnnnnnnnnnnnnnnnnnnnnnnnnnnnnnnnnnnnnnnnnnnnnnnnnnnnnnnnnnnnnnnnnnnnnnnnnnnnnnnnnnnnnnnnnnnnnnnnnnnnnnnnnnnnnnnnnnnnnnnnnnnnnnnnnnnnnnnnnnnnnnnnnnnnnnnnnnnnnnnnnnnnnnnnnnnnnnnnnnnnnnnnnnnnnnnnnnnnnnnnnnnnnnnnnnnnnnnnnnnnnnnnnnnnnnnnnnnnnnnnnnnnnnnnnnnnnnnnnnnnnnnnnnnnnnnnnnnnnnnnnnnnnnnnnnnnnnnnnnnnnnnnnnnnnnnnnnnnnnnnnnnnnnnnnnnnnnnnnnnnnnnnnnnnnnnnnnnnnnnnnnnnnnnnnnnnnnnnnnnnnnnnnnnnnnnnnnnnnnnnnnnnnnnnnnnnnnnnnnnnnnnnnnnnnnnnnnnnnnnnnnnnnnnnnnnnnnnnnnnnnnnnnnnnnnnnnnnnnnnnnnnnnnnnnnnnnnnnnnnnnnnnnnnnnnnnnnnnnnnnnnnnnnnnnnnnnnnnnnnnnnnnnnnnnnnnnnnnnnnnnnnnnnnnnnnnnnnnnnnnnnnnnnnnnnnnnnnnnnnnnnnnnnnnnnnnnnnnnnnnnnnnnnnnnnnnnnnnnnnnnnnnnnnnnnnnnnnnnnnnnnnnnnnnnnnnnnnnnnnnnnnnnnnnnnnnnnnnnnnnnnnnnnnnnnnnnnnnnnnnnnnnnnnnnnnnnnnnnnnnnnnnnnnnnnnnnnnnnnnnnnnnnnnnnnnnnnnnnnnnnnnnnnnnnnnnnnnnnnnnnnnnnnnnnnnnnnnnnnnnnnnnnnnnnnnnnnnnnnnnnnnnnnnnnnnnnnnnnnnnnnnnnnnnnnnnnnnnnnnnnnnnnnnnnnnnnnnnnnnnnnnnnnnnnnnnnnnnnnnnnnnnnnnnnnnnnnnnnnnnnnnnnnnnnnnnnnnnnnnnnnnnnnnnnnnnnnnnnnnnnnnnnnnnnnnnnnnnnnnnnnnnnnnnnnnnnnnnnnnnnnnnnnnnnnnnnnnnnnnnnnnnnnnnnnnnnnnnnnnnnnnnnnnnnnnnnnnnnnnnnnnnnnnnnnnnnnnnnnnnnnnnnnnnnnnnnnnnnnnnnnnnnnnnnnnnnnnnnnnnnnnnnnnnnnnnnnnnnnnnnnnnnnnnnnnnnnnnnnnnnnnnnnnnnnnnnnnnnnnnnnnnnnnnnnnnnnnnnnnnnnnnnnnnnnnnnnnnnnnnnnnnnnnnnnnnnnnnnnnnnnnnnnnnnnnnnnnnnnnnnnnnnnnnnnnnnnnnnnnnnnnnnnnnnnnnnnnnnnnnnnnnnnnnnnnnnnnnnnnnnnnnnnnnnnnnnnnnnnnnnnnnnnnnnnnnnnnnnnnnnnnnnnnnnnnnnnnnnnnnnnnnnnnnnnnnnnnnnnnnnnnnnnnnnnnnnnnnnnnnnnnnnnnnnnnnnnnnnnnnnnnnnnnnnnnnnnnnnnnnnnnnnnnnnnnnnnnnnnnnnnnnnnnnnnnnnnnnnnnnnnnnnnnnnnnnnnnnnnnnnnnnnnnnnnnnnnnnnnnnnnnnnnnnnnnnnnnnnnnnnnnnnnnnnnnnnnnnnnnnnnnnnnnnnnnnnnnnnnnnnnnnnnnnnnnnnnnnnnnnnnnnnnnnnnnnnnnnnnnnnnnnnnnnnnnnnnnnnnnnnnnnnnnnnnnnnnnnnnnnnnnnnnnnnnnnnnnnnnnnnnnnnnnnnnnnnnnnnnnnnnnnnnnnnnnnnnnnnnnnnnnnnnnnnnnnnnnnnnnnnnnnnnnnnnnnnnnnnnnnnnnnnnnnnnnnnnnnnnnnnnnnnnnnnnnnnnnnnnnnnnnnnnnnnnnnnnnnnnnnnnnnnnnnnnnnnnnnnnnnnnnnnnnnnnnnnnnnnnnnnnnnnnnnnnnnnnnnnnnnnnnnnnnnnnnnnnnnnnnnnnnnnnnnnnnnnnnnnnnnnnnnnnnnnnnnnnnnnnnnnnnnnnnnnnnnnnnnnnnnnnnnnnnnnnnnnnnnnnnnnnnnnnnnnnnnnnnnnnnnnnnnnnnnnnnnnnnnnnnnnnnnnnnnnnnnnnnnnnnnnnnnnnnnnnnnnnnnnnnnnnnnnnnnnnnnnnnnnnnnnnnnnnnnnnnnnnnnnnnnnnnnnnnnnnnnnnnnnnnnnnnnnnnnnnnnnnnnnnnnnnnnnnnnnnnnnnnnnnnnnnnnnnnnnnnnnnnnnnnnnnnnnnnnnnnnnnnnnnnnnnnnnnnnnnnnnnnnnnnnnnnnnnnnnnnnnnnnnnnnnnnnnnnnnnnnnnnnnnnnnnnnnnnnnnnnnnnnnnnnnnnnnnnnnnnnnnnnnnnnnnnnnnnnnnnnnnnnnnnnnnnnnnnnnnnnnnnnnnnnnnnnnnnnnnnnnnnnnnnnnnnnnnnnnnnnnnnnnnnnnnnnnnnnnnnnnnnnnnnnnnnnnnnnnnnnnnnnnnnnnnnnnnnnnnnnnnnnnnnnnnnnnnnnnnnnnnnnnnnnnnnnnnnnnnnnnnnnnnnnnnnnnnnnnnnnnnnnnnnnnnnnnnnnnnnnnnnnnnnnnnnnnnnnnnnnnnnnnnnnnnnnnnnnnnnnnnnnnnnnnnnnnnnnnnnnnnnnnnnnnnnnnnnnnnnnnnnnnnnnnnnnnnnnnnnnnnnnnnnnnnnnnnnnnnnnnnnnnnnnnnnnnnnnnnnnnnnnnnnnnnnnnnnnnnnnnnnnnnnnnnnnnnnnnnnnnnnnnnnnnnnnnnnnnnnnnnnnnnnnnnnnnnnnnnnnnnnnnnnnnnnnnnnnnnnnnnnnnnnnnnnnnnnnnnnnnnnnnnnnnnnnnnnnnnnnnnnnnnnnnnnnnnnnnnnnnnnnnnnnnnnnnnnnnnnnnnnnnnnnnnnnnnnnnnnnnnnnnnnnnnnnnnnnnnnnnnnnnnnnnnnnnnnnnnnnnnnnnnnnnnnnnnnnnnnnnnnnnnnnnnnnnnnnnnnnnnnnnnnnnnnnnnnnnnnnnnnnnnnnnnnnnnnnnnnnnnnnnnnnnnnnnnnnnnnnnnnnnnnnnnnnnnnnnnnnnnnnnnnnnnnnnnnnnnnnnnnnnnnnnnnnnnnnnnnnnnnnnnnnnnnnnnnnnnnnnnnnnnnnnnnnnnnnnnnnnnnnnnnnnnnnnnnnnnnnnnnnnnnnnnnnnnnnnnnnnnnnnnnnnnnnnnnnnnnnnnnnnnnnnnnnnnnnnnnnnnnnnnnnnnnnnnnnnnnnnnnnnnnnnnnnnnnnnnnnnnnnnnnnnnnnnnnnnnnnnnnnnnnnnnnnnnnnnnnnnnnnnnnnnnnnnnnnnnnnnnnnnnnnnnnnnnnnnnnnnnnnnnnnnnnnnnnnnnnnnnnnnnnnnnnnnnnnnnnnnnnnnnnnnnnnnnnnnnnnnnnnnnnnnnnnnnnnnnnnnnnnnnnnnnnnnnnnnnnnnnnnnnnnnnnnnnnnnnnnnnnnnnnnnnnnnnnnnnnnnnnnnnnnnnnnnnnnnnnnnnnnnnnnnnnnnnnnnnnnnnnnnnnnnnnnnnnnnnnnnnnnnnnnnnnnnnnnnnnnnnnnnnnnnnnnnnnnnnnnnnnnnnnnnnnnnnnnnnnnnnnnnnnnnnnnnnnnnnnnnnnnnnnnnnnnnnnnnnnnnnnnnnnnnnnnnnnnnnnnnnnnnnnnnnnnnnnnnnnnnnnnnnnnnnnnnnnnnnnnnnnnnnnnnnnnnnnnnnnnnnnnnnnnnnnnnnnnnnnnnnnnnnnnnnnnnnnnnnnnnnnnnnnnnnnnnnnnnnnnnnnnnnnnnnnnnnnnnnnnnnnnnnnnnnnnnnnnnnnnnnnnnnnnnnnnnnnnnnnnnnnnnnnnnnnnnnnnnnnnnnnnnnnnnnnnnnnnnnnnnnnnnnnnnnnnnnnnnnnnnnnnnnnnnnnnnnnnnnnnnnnnnnnnnnnnnnnnnnnnnnnnnnnnnnnnnnnnnnnnnnnnnnnnnnnnnnnnnnnnnnnnnnnnnnnnnnnnnnnnnnnnnnnnnnnnnnnnnnnnnnnnnnnnnnnnnnnnnnnnnnnnnnnnnnnnnnnnnnnnnnnnnnnnnnnnnnnnnnnnnnnnnnnnnnnnnnnnnnnnnnnnnnnnnnnnnnnnnnnnnnnnnnnnnnnnnnnnnnnnnnnnnnnnnnnnnnnnnnnnnnnnnnnnnnnnnnnnnnnnnnnnnnnnnnnnnnnnnnnnnnnnnnnnnnnnnnnnnnnnnnnnnnnnnnnnnnnnnnnnnnnnnnnnnnnnnnnnnnnnnnnnnnnnnnnnnnnnnnnnnnnnnnnnnnnnnnnnnnnnnnnnnnnnnnnnnnnnnnnnnnnnnnnnnnnnnnnnnnnnnnnnnnnnnnnnnnnnnnnnnnnnnnnnnnnnnnnnnnnnnnnnnnnnnnnnnnnnnnnnnnnnnnnnnnnnnnnnnnnnnnnnnnnnnnnnnnnnnnnnnnnnnnnnnnnnnnnnnnnnnnnnnnnnnnnnnnnnnnnnnnnnnnnnnnnnnnnnnnnnnnnnnnnnnnnnnnnnnnnnnnnnnnnnnnnnnnnnnnnnnnnnnnnnnnnnnnnnnnnnnnnnnnnnnnnnnnnnnnnnnnnnnnnnnnnnnnnnnnnnnnnnnnnnnnnnnnnnnnnnnnnnnnnnnnnnnnnnnnnnnnnnnnnnnnnnnnnnnnnnnnnnnnnnnnnnnnnnnnnnnnnnnnnnnnnnnnnnnnnnnnnnnnnnnnnnnnnnnnnnnnnnnnnnnnnnnnnnnnnnnnnnnnnnnnnnnnnnnnnnnnnnnnnnnnnnnnnnnnnnnnnnnnnnnnnnnnnnnnnnnnnnnnnnnnnnnnnnnnnnnnnnnnnnnnnnnnnnnnnnnnnnnnnnnnnnnnnnnnnnnnnnnnnnnnnnnnnnnnnnnnnnnnnnnnnnnnnnnnnnnnnnnnnnnnnnnnnnnnnnnnnnnnnnnnnnnnnnnnnnnnnnnnnnnnnnnnnnnnnnnnnnnnnnnnnnnnnnnnnnnnnnnnnnnnnnnnnnnnnnnnnnnnnnnnnnnnnnnnnnnnnnnnnnnnnnnnnnnnnnnnnnnnnnnnnnnnnnnnnnnnnnnnnnnnnnnnnnnnnnnnnnnnnnnnnnnnnnnnnnnnnnnnnnnnnnnnnnnnnnnnnnnnnnnnnnnnnnnnnnnnnnnnnnnnnnnnnnnnnnnnnnnnnnnnnnnnnnnnnnnnnnnnnnnnnnnnnnnnngaattcaatgaaatggtttggaatggtgtggaatggaatggaatggaatgcaatggaatggaatcaaagcgagtggaatggaatggaatgaaatggaatggaatggaatcaacacgagtggaatggaagggaatggaatgagatgggatggaatggaatggaatgaaatgcaatggaatcaacccgagtagaatggaaaggaatggagtggaatggaaaggaatggaatggaatggaatgcaatggaatccacccgatatgaatggaagcgaatggcacggaatggaatggaatgcaatggaatggaatggaatggaatggaatgcaaggtcatggaatggaatggagtcaactggaatggaatggaatggaatggaaccaacacgagtggaatgaaatggaaaggagcggaatggacaggaaaggaatggaaaggaactgaatgtaatggaatcgaatggagtggaattgaatggaatggaatggaatcaacgtgagtgaaatggaatggaatggaatggaatgaaggggaatggaatggaatggaatggaatggaatgcaatggattcaatgcgtgtgcaatggaatggaatggaatggaatggaatggaattaacaagaatggaaaggattggaatggaatggaatggaatggaatggaatggagaggaggcaaaccgagtggaatggaatggattgcaatggaatggaaaggaatggaaaggaatggaatggaatgcaacggaatggagtggaatggaatggaatggaatcaatgcaagtgtaattgaatggaatggaatggaatggaatggaatggagtggaattgattggaattgatatgaatggaatggaatcaactggaatggaacggaatggaatggaatggaatggaatggaatggaatggaatggaatcaactagaatggaaaggaatggaatggaatgcaatggaatggaatggaatggaatggaatcaacccttgtgaaaggtaaagcaaaggaatggaatggaatggaatggaatggaatcaacaaaagtggaatggaatggaatggaatacaacgaaatggaaaggaatggaatggaataaaccggagtggaatggagtggaatggaatgcaatggattcgattggaatttaattaacccgattggaatggagtggaatggaattgaatggaatggaaagaagccaattggaatgcagtggactgcaaaggaatggaattgaaaaagatggaatggaatggaatggaatggaatggaatggaatggaatggaatggaatcaacccgagtggaatggaatggaatggaatggaaaagaatggaatggaatggaaccaataagagtggaatggattggaatggaatggaatggaatgaaagagaatggaatcaacccgagtggaatggaatggaatggaatggaatggaatggaatggaatggaatggaatggaataaacctgagtagaatgcaatggaagggtatggaatcgaatggaatggaatggcattgaatggaatcaacacaggtggaatggaatggaatggagtggattggaaagttatggaatcaacccgaatggaatgtaatggaatggaatggaatgaaatgcagtggaatttccccgagtggaatggaatggtatggagtgaaatggaacggaatggaatggtatggaatggaaaggaatggaatgaaaaggaaaggaaagcaatggaatcaaaacgagtggaatggaatggaatgtaaagaaatggagtggaattctatagaatcaacacgagtggaatggaatggaaaggaattgaatggaatggaatggaatggaatggaatggaatggaatgaaaaggaatggattcaatgtaagtgtaatggaatggaatagaatggggtggaatggaatggaatggaatggaatggaatggaatggaatggaatggaatggcatggagtggaatcaactggaatggaatggaatggaacgcaatggaatggaattgaatggaatggaatcaactagaatggaaaggaatgaaatggaatagaatgcgatggaatgaactggaatggaatcaacccgtgtggaatgtaatgcaaaggaatggaatggaatggaatggaatcaacaaaagtgtaatggaagggaaaggaatagaatggaatggaaagcaatgcagtcaacacgaatggaatcgaatggagtggaatttaatggaatggaatggaatggaatggaatggaatgcaatggaatggaatgggatagaatggaatcaaactgaggggagtggaatggaattgaatgtaatggaatggaatgaattggaatggaaaggaatggaacggaacggaatggaatcaaccagaatgcaatggaattgaatggaatggaatggaatggaatcaacgcgagtggaatggaattgaatggaatggaatggaatgtaatcaacccgagtggaatggaatggaatggaatggaatggaattaacccgagtgaaatggaatggaaaggaacggaatggaatttaatggaatttaatgtaatggaatggaatggaatggaatggaatggaatgcaaaggaatggaaaggaatggaatggaatggatttgaatggagtcactgcaagtgtaatggaatggaatggaatggaatggaatgcaatggaatggaatggagaggaatggaatggaattgatttgaatggaatggaatcaactggaatggaatgcaatggaatggaatggaatggaatcaactagaatggaaaggaatggaatggaatggaatgcagtggaatggaacggaatcaacccgtgtggaatgtaatgcaaaggaatggaatggaatggaatggaaccaacaaaagtggaatggaagggaatggaatagaatggaatggaatggaatagaaagcaaaggagtcaacacgaatggaatcgaatagaatggaatgcaaaggaatggaatggaatggaatgcaatggaatggaatggaatgcaatggaatggaatgggaagggatggaatataaacaaaccgagtggagtagaatggaattgaatggaatggaatggaaaaattggaatggaaaaaattggaatggaaaggaatggaatggaaaggaatggaatggaatggaatggaatcaaccagagttgaatggaatggaatggaatggaatggaatggaatggaatggaatggaatggaatcaacccgagtggaatggaattgaatggaatggaatggaatggaatggaatgcaatggaacggaaaggaatggaatagaatggaatggaaaggaatggattagagtggaatggaatggaatgaaatggaatggaatggaatggaatggaatcaacccgagtggaatgtaatggaatggaatggaaaggaatacaatcaacccaagtagaaaggaatggtaaggaatgaaatggaatggaatggaatggtatggaatggaatggaatggaatggaatgcaatggaaaggaatgcaatggaatcaaagcgaatggaatggaatggaatggaaaggaatggaatggaattcaatagaatcaacgcgagtggaagggaatgcaaaggaatggaatggaatggaatggaatggaatggaatggaatgaaatggattggaatcaacccgcgtggaatgtagcggattcgaatggaatggaatcaacccgataggaatggaatgaaatggaatggaatgcaatggaattgaatggaaaggaatggagtcaaacctactggaatggaagggaatggaatgcaaaggaatggaatggaatggaatgcacaggaatggaatggaatggaatgcaatggaatcaacccgactggactggaatggaatggaatggaatggaatgaaacggagtcaaaccgactgcaatggaatggaatggaagggaatggaatggaatggaatcgaatgaagttaactcgaatggaatggaatggaatggaatggaatggaatggaatggaatggattcaatgtgagaggaatggaatggaatggagtggaatggactggaacgaaatggaatagaatggaatggaatggattgaaatggaatggaaaggaataaaatcaagtgaaattggatggaatggattgaaatggaaaggaatggaatggaatggaaaggaattaaatggaatccacccaagtggaatggaatggattggaatggaaaggaatggaatggaatggaatggaatggacttcacacgagtgcaacggaatggaatggaatggaaccaagccgagtggaatggaatggaatggaaattaatggaatggaatggaatggaatggaatcaacccgagtggaatggaatggaattcaatgaaatggtttggaatggtgtggaatggaatggaatggaatgcaatggaatggaatcaaagcgagtggaatggaatggaatgaaatggaatggaatggaatcaacacgagtggaatggaagggaatggaatgggatgggatggaatggaatggaatgaaatgcaatggaatcaacccgagtagaatggaaaggaatggagtggaatggaaaggaatggaatggaatggaatgcaatggaatgcaccagattagaatggaagcgaatggcacggaatggaatggaatggaatggaatggaatggaatggaatggaatgcaaggtcatggaatggaatggagtcaactggaatggaatggaatggaatggaaccaacacgagtggaatgaaatggaaaggagcggaatggacaggaaaggaatggaaaggaactgaatgtaatggaatcgaatggagtggaattgaatggaatggaatggaatcaacgtgagtgaaatggaatggaatggaatggaatgaaggggaatggaatggaatggaatgcaatggattcaatgcgtgtgcaatggaatggaatggaatggaatggaattaacaagaatggaaaggattggaatggaatggaatgcaatggaatggaatggagaggaggcaaaccgagtggaatggaagggattccaatggaatggaaaggaatggaaaggaatggaatggaatgcaacggaatggagtggaatggaatggaatggaatcaatgcaagtgtaattgaatggaatggaatggaatggaatggaatggaatggaatggaatggagtggaattgattggaattgatatgaatggaatggaatcaactggaatggaacggaatggaatggaatggaatggaatggaatcaactagaatggaaaggaatggaatggaatgcaatggaatggaatggaatggaatggaatcaacccttgtgaaaggtaaagcaaaggaatggaatggaatggaatggaagggaatcaacaaaagtggaaaggaatggaatggaatacaaaggaatggaaaggaatggaatggaataaaccggagtggaatggagtggaatggaatgcaatggattcgattggaatttaattaacccgattggaatggagtggaatggaattgaatggaatggaaagaagccaattggaatgcagtggactgcaaaggaatggaattgaataagatggaatggaatggaatggaatggaatggaatggaatggaatggaatggaatcaacccgagtggaatggaatggaatggaatggaaaagaatggaatggaatggaaccagtaagagtggaatggattggaatggaatggaatggaatgaaagagaatggaatcaacccgagtggaatggaatggaatggaatggaatggaatggaatggaatggaatggaataaacctgagtagaatgcaatggaagggtatggaatcgaatggaatggaatggcattgaatggaatcaacacaggtggaatggaatggaatggagtggattggaaagttatggaatcaacccgaatggaatgtaatggaatggaatggaatgaaatgcagtggaatttccccgagtggaatggaatggtatggagtgaaatggaacggaatggaatggtatggaatggaatggaatggaatgaaaaggaaaggaaagcaatggaatcaaaacgagtggaatggaatggaatgtaaagaaatggagtggaattctatagaatcaacacgagtggaatggaatggaaaggaattgaatggaatggaatggaatggaatggaatggaatggaatggaaaccaatccaatgtaaatcaatggaacggaacggaatagaattccgttcgagtggaatggaaattcgagtggaatggaatggaatgcaatgtaatataatggaaatgaatggaatccacccgaatggaaaggaaaggaatggaatggaatggaatggaatggaatggaatggaatggagaggaatggaatggaatggaatgcagaggaatggaatggaattgatttgaatggaatggaatcaactggaatggaatggaatggaatggaatggaatggaatggaatggaatcaactagaatagaatggaatggaatgcagtggaatggaatggaatggaatcaacccgtgtggaatgtaatgcaaaggaatggattggaatggaatggaatcaacaaaagtgtaatggaagggaatggaatagaatggaatggaatggaatggaaagcaatggagtcaacccgaatggaatcgaatggaatggaatgcaatggaatggaatgcaatggaatggaatggtatagaatggaatgggatggaatggaatccaacagagtggagaggaagggaattgaatggaatggaatggaataaattggaatggaaaggaatggaatggaatggaatggaatggaatggaatggaatggaatcaaccagagtggaatggaatggaatggaatggaacggaatcggatagaatggaatcaaaccgagtggagtggaatggaattaaatgtaatggaatggcataaattagaatggaaaggaatggaatggaatggaatggaatcaaccagagtggaatggaactgaatgcaatgcaatggaatggaatcaacccgaggggaatggaattgaatggaatggaatgcaatggaatcaacccgagtggaatggaattgaatggaatggaatggaatggaatcaacccgagtggaatggaattgaatggaatggaatggaattaacccgagtgaaatggaatggaaaggaacggaatggaatgtaatggaatggaatggaatggaatcaacctgagtggactggaatgaaatggactggaatggaaagcaatggaattgagtggaatcaaccagagttgaatggaattgaatggaatggaatgcaatggaatcagcccaaatggaatgtaatgaaatggaattgaatggaattaccccaagtgaaatggcatggaaaggaacggaatagaatttaatggaatggaatggcatgcaatggaatcaacccgagtggaatggaatggcatgaaatggaatgcaatgcaatggaatggaaacaataagagtagaatggattagaatggaatggaatggaatgaaagggaatggaatggaatggaatggaatggattggaatcaaaaatagtgtaatggaatggaatggaaaggaatggaatggaatgaaatcaacccgagtggaatggaatggaatggaatgggatacaatagaatgaaatggagtggattggaataaatctgagtggaatggaaaggaatggaaaggaatggaattgaagagaatggaatggaatggaatggagtggaatgcaatggaatggaatggaatggaatggaatggaatggaaaggaatcaaccagagtggaattgactgtaatggacgggaatggaatggaatggaatggaatggaatggaatggaatggaatggaatggaaaggaattgaacagaatggaatggaaaggaatggattggagtggaatggaatggaatggaatggaatggaatggaatggaatggtatcaatgcaagtgtaattgaatggaatggaatggagtggagaggaatggaatggaattgctttgaatgcactggaatcacctggaatcgaatggaatggaatggaatcaactagaatggaaaggaatggaatggaatggaatgcagttgaatggaatggcatggaatcaacccgtgtggaatgtaatgcaaaggaatggaatggaatggaatggaatggaatggaatggaatggactgaacaaaagtggaatggaagggaatggaatagaatggaatggaatggaatggaatggaattgaaagcaatggagtcaacacgaatggaatcgaatggaatggaatgcaatggaatggaatggaatgcaatggaatggaatggaaaggaatggaatggaatggaatggaatggaatgggatggaatggaatggaatcaaccagagtggaatagaattgaatggaattgaatggaatgaaatcaacccgagtggaatggaattgaatcgaatggaatggaatggaatggattagaatggaatggaatggaatggaatcaaccagagtggaatggaattgaatggaatggaatggaatggaatcaacccgagtggaatggaattgaatggaatggaatggaatggaatggattggaatggaatggaatggaatggaaacaaccagagtggaaaggaattgaatggaatggaatggaatagaatcaacccgagttgaattgaaaggaatggaatggaatggaatcgaatggaatggaatggaatggaatggattggaatggaatggaatggaatcaacgcgagtggaatggaatggaatgaattgaatggaattaacccgagtgaaatggaatggaaaggaatggaatggaatttaatggaattgaatggaatggaatggaatcaacctgaatggaatggaatgaaatggaatggaatggaaagcaacggaattgaatggaatcaaccagagttgaatggaattgaatggaatggaatggattggaatcaacccaaatggaatagaatggaatggaattgaatggaattaccccgagtgaaatggcatggaaaggaacggaatataatttaatggaatagaatggaatggaatggaatcaacccgagtgtaactgaatggaatgtaatggaatgcaatgtaatggaatggaaccaataagagtggaatggattggaatagaatggaatggaatgaaagggaatggaatcaacctgagtggaatggaatggaatggaatggaatggaatggaatggaatggaatggaatggaatacaccagagtggaatggaatagaatggaatggaatggagtggaatcaaccccagtggaatggaatggaatggaatggaatggaatggaatggaatgggatggaatggattggaatcaaaccgagtggaatggaatggaatgcaatggaacggaaaggaatgcaatggaatgaaataaacccgaatggaatggaatggaacggaatagaatagaatggaatggagttgattggaatcaatctgagtttaatcgaaaggaatggaaaggaatggaattgaagagaattgaatggaatggaaaggagtggaatggaatggaatggaatggaatggaatggaatggaatggaatggaatggaatgcaatggaatgcaatggaatcaaccagagtggaattgagtgtaatggatcgaaatggaatggaatggaatggaataaacctgagtagaatgcaatggaagagaatggaatcgaatggaatggaatggaatggctttgaatggaatcaacatgggtggaatggaatggaatggagtggattggaaagttatggaatcaacccgaatggaatgtaatggaatgtaatggaatggaatgcagtggaattaacccgagtggaatggaatggtatggagtgaaatggaacggaatggaatggtatggaatggaatggaatgaaaaggaaaggaaagcaatggaatcaaaacgagtggaatggaatggaatgtgaagaaatggagtggaattctatagaatcaacacgagtggaatggaatggaaacgaattgaatgcaatggaatggaatggaatggaatccaatccaatgtaaaggaatggaacggaacggaataggatgtaatggaatggaatggaatggactggaatggaaaaaattctagtgcaatggaatggaatgaaaagtaatataagggaaatgaatggaatccactcgaatggaaaggaaaggaatggaatggaatggaatggaatgcaatggaatggaatggagaggaatggaatggaatggaatggagaggaatggaatggaatggaatgcagaggaatggaatggaattgatttgaatggaatggaaccaactggaatggaatggtatggaatggaatggaatcaactagaatggaaaggaatgaaatggaatggaatgcagtggaatggaatggaatggaatcaacccgtgtggaatgtaatgcaaaacaatggaatggaatggaatggaatcaacaaaagtgtaatggaagggaatggaatagagtggaatggaatggaatggaaaacaatggagtcaacccgaatggaatccaatggaatggaatgcaatggaatggaatggtatagaatggattgggatggaatggaatccaaccgagtggataggaagggaattgaatggaatggaatggaataaattggaatggaaaggaatggaatggaatggaatggaatggaatcaaccagagtggaatggaatggaatggaatggaatcggatagaatggaatcaaaccgagtggagtggaatggaattaaatgtaatggattgaaataaattagaatggaatggaattaattagaatggaaaggaatggaatggaatggactggaatcaaccagagtggaatggaattgaatggaatggaatggaatggaatcaacccgagtggaatggaattgaatggaatggaatggaatggaatcaacccgagtggaatggaattgaatggaatggaatggaattaacccgagtgaaacggaatggaaaggaacggaatggaatttaatggaatggaatggaatgaaatcaacctgagtggactggaatgaaatggactggaatggaaagcaatggaattgagtggaatcaaccagagttgaatggaattgaatggaatggaatggaatggaatcaacccaaatggaatgtaatgaaatggaattgaatggaattacccccagtgaaatggcatggaaaggaacggaatagaatttaatggaatggaatggcatgaaatggaatcaacccgagtggaatggaatggcatgaaatgaaatgcaatgcaatgcaatggaaaaaataagagtggaatggattggaatggaatggaatggaatggaatgaaagggaatggaatcaccccgagtggaatggaatggaatggaatggaatgcaatggaatggaacggaaagcaatggaatggaatggaatacaccagagtggaatggaatagaatggaatggaatggagtggaatcaaccccagtggaatggaatggaatggaatggaatggaatggaatggaatggaatggattggaatcaacccgagtggaatggaatggaatggaatgggatgcaatagaatgaaatggagtggattggaatcaatctgagtggaatggaaaggaatggaaaggaatcgaattgaagagaatggaatggaatggaatggaatggaatggaatggaatcaaccagagtggaattgactgtaatggaccggaatggaatggaatggaatggaatggaatggaatggaatggaatggaatggaatggaaaggaattgaacggaaaggaattgaacagaatggaatggaaaggaatggattggagtggaatggaatggaatggaatggaatggtatcaatgcaattgtaattgaatggaatggaatggaatggagaggaatggaatggaattgctttgaatgcaatggaatcagctggaatcgaatggaatggaatggaatcaactagaatggaaaggaatggaatggaatggaatgcagttgaatggaatggaatggaatcaacctgtgtggaatgtaatgcaaaggaatggaatggaatggaatggaatggaatggtatggaatggaatcaacaaaactggaatggaagggaatggaatagaatggaatggaatggaatggaattgaaagcaatggagtcaacccgaatggaatcgaatggaaaggaatgcaatggaacggaatggaatgcaaaggaatggaatggaatggaatggaatggaatggaatggaatggaatggaatggaatggaatggaatgggatggaatggaatggaatcaaccagagtggaatagaattgaatggaattgaatggaatgaaatcaacctgagtggaatggaattgaatcgaatataatggaatggaatggaatggaatggaatggaatggaatggaatggaatggaatggaatcaaccagagtggaatggaattgaatggaatggaatggaatggaatcaacccgagtggaatggaattgaatggaatggaatggaatggaattaacccgagtgaaatggaatggaaaggaacggaatggaatttaatggaatggaatggaatggaatcaacctgagtggactggaatgaaatggggtggaatggaaagcaatggatttgaatggaatcagccagagttgaatggacttgaacggaatggaatggaatggaatcaacccaaatggaatgtaatggagtggaattgaatggaattaccccgagtgaaatggcatggaaaggaatggaatagaaattaatggaatgaaatggaatggaatggaatcaacatgactggaatggaatggaatgaaatggaatgcaatgcaatggaatgcaaccaataagagtggaatggattggaatggaatggaatggaatgaaagggaatggaatcaatccacgtggaatggaacggaatggaatggaatggaatggaatggaatggaatacaccagagtggaatggaatagaatggaatggaatggagtggaatcaaccacagtggaatggaatggaatagaatggaatggaatggattggaatcaaaccgagtgtaatggaatggaatggaaaggaatggaatggaatgaaatcaacccgagtgaaatggaatagaatggaatgggatggaatataatggaatggagtggattggaatcaaactgattggaatggaaaggaatgaaaaggaacggaattgaagggaatggaatggaatggaatggaatggaatggaatggaatggaatggaataaacccgagtagaatgcattttaagggaaaggaattgaatgtaatggaatggcattgaatggaatcaacacgagtggaatggaatggaatggaatggaatggaatggaatggaatggaatggaatgaaagggaatagaatcaacccgtgtgaaatggaatggaatggaatggaatggaatggaatggaatggaatggaatggaatggaatggaatggaatggaatggaatacaccagagtggaatggaatagaatggaatggaatggagtggaatcaaccacagtgtaatggaatggaatggaatggaatggaatggaatggaatggtatggaatggaatggaatggattggaatcaaaccgagtgtaatggaatggaatggaaaggaatggaatggaatgaaatcaacccgagtgaaatggaatggaatggagtgggatggaatagaatggattggagtggattggaatcaatctgagtgcaatggaatggaatggaaaggaatggaattgaagggaatggaatggaatggaatggaatggaatggaatggaatggaatggaataaacccgagtagaatgcaatggaagggaatggattcgaatgtaatggaatggcattgaatggaatcagcacgattggaatggaatggaatggaatggattggagtggaatggaatcaaccccagtagaatgtaatgtacaggaatggaatggaatggagtagaatgaacccgagtggaatggaatggtatggaatgaaacggaatggaatggaatggtatggaatggaacggaatggtattgaacggaatggaatggaatggaatggaatcgaatccagtgtaaaggaatggaacggaatggaatgtaatggaatggaatggaatggaatggaatggaatggaaaggaatggactggaatggaataaattgcagtggaatggtatggaatgcaaagtaatataatgaaaatgagtggaatccaccaaaatggaaaggaaaggaatggaatggaatggaatgaatggaatggattggaaaggaatcaacccgagtggaatggaaaggaatggaatggaatggaatgcaatggaatggaatggaatggaatggaatggaatggattggaatggaatcaccccatgtggaatggaaagaatggaatggaatggaaagcaatggcatggaatggaatggaaaggaatcgaatggaatggaatggactggaatggaatggaatcaacccgggtggaatgtaatggaatgaaatggaatggaatggaatggaatggaatggaatggaatcaaatggatttgaatcaacctgcacggaatgtagtggaatcgaatggaatggaatcaacccgataggaatggaatgaaatggaattgaatggaaaggaatcgagtcaaccctactggaatggaagggaatggaatggaaaggaatggaatggaatggaatgcaatggaatcaacccgactggactggaatggaatggaatgcaatggaatggaatgaaatggagtcaaaccgactggaatggaatggaatggaatggaatggaatggaatggaatggaatggagtggaatggactggaatgcaatggaatggattgaaatggaatggaaaggaataaaatcaagtgaaattggatggaatggattggaatagaaaagaatggaatggaatggaatggaatggaatggaatgaaatgcaatccaccgaagtggaatggaatggattggaatggattggaatggaatggaatggaatggaatggaatggaatggacttcacacgagtgcaacggaatggaatggaatggaaccaacccgagtggaatggagtgtaatggaaattaatggaatggaatggaatggaatcaacacgagggaatggaacggaatgcaatgaaatggtatggaatggtgtggaatggaatggaatggaatgcaatggaatggaatcaaagcgagtggaatggaatggaatgaaatggaatggaatggaatcaacacgagtggaatggaagggaaaggaatgggatgggatggaatggaatggaatgcaatgcaatggaatcaacccgagaagaatggaaaggaaaggaatggaatggaatggaatggaatggaatccacccgattagaatggaaaggaatggcaaggaaggcaatggaatggaatggaatggaatggaatggaaaggaatgcaagggcatggaatggaatgtagtcaactggaatggaatggaatggaatggaatggaatggaatggaatggaatcaacaccagtggaatgaaatggaaaggagcggaatggacaggaaaggaatggaaaggaactgaatgtaatggaatcgaatggagtggaaatgaatggaatggaatggaatcaatatgagtgaaatggaatggaatggaatggaggggaacggaatggaatggaatggaatgcaatggaatcaatgcgagtgcaatggaatggaatggaatggaatggaatggaatggaatggaatagaaaggaatggagtaaataaaatggaatttatttgaatggaatggaatcaaatggaatggaatggaatgcaatggaatggaatggaatggaatggaatgccatggaatggaaagaaatggaattaacaagaatggaaaggaatgcaatggaatggaatggaatggaatggaatggaatcaatgcaagtgtaattgaatggaatggaatggagtggaattgattggaattgatatgaatggaatggaaacaactggaatggaacggaatggaatggaatggaatggaatcaactagaatggaaaggaatggaatggaatgcaatcgaacggaatggtatggaatggaatcaacccttgtgatacgtaaagcaaaggaatggaaaggaaaggaatggaatcaacaaaagtggaatggaatgcaatggaataaaatggaatggaatgcaatggaatggaatggaatggaatggaaaagaataaaccagagtggaatggaatggaatggaatgcaatggattcaattggaatttaattaacccgattgcaatggagtggaatggaatggaatggaatggaatggaatggaaagaagccgattggaatgcattggactgcaaaggaatcgaattgaaagggatggaatggaatggaatggaatggaatggaatggaatggaatggaatggaatcaacccgagtggaatggaatagaatggaatggaatgcaatcaacccgagtggaatggaatggagtggaatggaatggaatggaatggattggaatggaatggaatcgaatgcaatggaatggaatagcgtggaatgtaatggaatgcaatggaaaggaatcaagccaggtggaatcaaaaggaatggaatggaattgaatgcaatggaattgaatggaatgaacccgagtggaatgtaatggcatggaacggagtggaatggaatggaaaggaatggaatggattcaacgcgattggaaaggaatggaatggaatggaatggaatcaacccgagtggaatggagtgcaacggaatggaatgaaatggaatggaatgcaatggaatggaatggaatcaacgtgattgtaaaggaatgaaatgaaatggaatggaatggaatgcaattgaatcaactcgattggaaaggaatggttggaatggaaatgaaaggaatggaatggaatgaaatcaacccgaatggaatggaatggaatggaatggaatggaatggaatggaatggaatggaatggaatcacccagagtacaattgaatggaatggaatggaatggaatggaagggaatggaatggaatggattcaaaccaaatggaatggaatggaatggattggaatggaatggaattgaatggaataaactgaagtggaatggtatagaatggaatggaatggtttggaatggaatggaatgggaaggaatggaatcaactagaatggaaaggaatggaatggaatggaatggaaacaaaccctgtggaatgtaatgcaaaggaatggaaaggaatggaatggaataaacaaaagtggtatggaagggaatggaatagaatggaatggaatggaatggaaagcaatggagtcaaccagaatggaatcgaatggaatcgattggaatgcaatggaatggaatggaatggaatggaatggaatggaatgggatggaatggcatcaaaccgagtggagtggaatggaattgaatgtaatggaatggaataaactgcaaatgaaaggaatggaatggaaaggaatggaaacaaccagagtggaatggaattgaatggaatggaatggaatggaatcaacccgagttgaattgaaaggaatggaatggaatggaatggaatggaatggaatggaatggaatggaatggattggaagggaatggaatggaatcaacgcgagtggaatggaatggaatgagttgaatggaattaacccgagtgaaatggaatagaaaggaatggaatggaatttaatggaattgaatggaatggaatggaatcaacctgagtggaatggaatggaattgaatggaatggaatggaatggaatggaatggaatggaatggaatggaatggaatggaatggagtacaccagagtggaatggaatagaatggaatggaatggagtggaatcaaccacagtggaatggaatgcaatggaatggagtggaatggaatggaatggaatggaatgggatggaatggattggaatcaaaccgagtggaatggaatggaatgcaatggaacggaaaggaatgcaatggaatgaaatacacccgaatggaatggaaaggaatggaatagaatagaatggaatggagttgattggaatcaatctgagtttaatcgaaaggaatggaaaggaatggaattgaagagaattgaatggaatggaatggaatggaatggaatggaatggaaaggaatggactggaatggaataaattgcagtggaatggtatggaatgcaaaggaatataatgaaaatgagtagaatccaccaaaatggaaaggaaaggaatggaatggagtggaatgaatggaatggattggaaaggaatcaacccgagtggaatggaatggaatggaatggaatggaatggaatggaatggaatggaatggaatggaatcaccccatgtggaatggaaagaatggaatggaatggaaagcaatggcatggaatggaatggaatggaatggaatggaatgcaatggattggaataaacctgcgtggaatgtagtggattcgaatggaatggaatcaacccgataggaatggaataaaatggaatggaatgcaatggaattgattggaaaggaatggagtcaaccctactggaatggaaggtaatggaatggaaaggaatggaatggaatggaatgcaatggaatcaacccgactggactggaatggaatggaatggaatgaaatggtgtcaaaccgactggaatggaatggaatagaatggaatggaatggaatacaccagagtggaatggaatagaatggaatggaatggagtggaatcaaccacagtggaatggaatggaatggaatggattggaatcaaaccgagtgtaaaggaatggaatggaaaggaatggaatggaatgatatccacccgagtgaaatggaatggaatggaatgggattgaatagaatggaatggagtggattggaatcaatctgattgaaatggaaaggaattgaaaggaatggaattgaagggaatggaatggaatggaatggaatggaatggaatggaatggaatggaatggaatggaataaacccaagtagaatgcaatcgaagggaatgcaatcgaatgtaatggaatggcattgaatggaatcaacacaagtggaatggaatggaatggaatggattggagtggaatggaatcaaccccagtggaatgtaatgtacaggaatggaatggaatggagtagaatgaacccgagtggaatggaatggtatggaatgaatcggaatggaatgcaatggtatggaatggaatggaatggtattgaagggaatggaatggaatggaatagaatccaatccagtgtaaaggaatggaacggaatggaatggaatggaatggaatggaatggaaaggaatggactggaatggaataaattgcagtggaatggtatggaatgcaaagtaatataatgaaaatgagtagaatccaccaaaatggaaaggaaaggaatggaatggagtggaatgaatggaatggattggaaaggaatcaacccgagtggaatggaaaggaatggaatggaatggaatggaatggaatggaatggaatggaatggaatcaccccatgtggaatggaaagaatggaatggaatggaaagcaatggcatggaatggaatggaatggaatggaatggaatggaatggaatggaatggattggaatcaacctgcgtggaatgtagtggattcgaatggaatggaatcaacccgataggaatggaataaaatggaatggaatgcaatggaattgattggaaaggaatggagtcaaccctactggaatggaaggtaatggaatggaaaggaatggaatggaatggaatgcaatggaatcaacccgactggactggaatggaatggaatggaatgaaatggagtcaaaccgactggaatggaatggaatggaatggaatgaaatggaatcaactggaatggaatggaatggaatggaatggaatggaatggaatgcaatggaatgccatggaatggaatggaatggaatggaatgccatggaatggaatgccatggaatggaatggaatggaatggaatggaatggaatgccatggaatggaatggaatggaatggaatggaatggaatgccatggaatgcaatggaatggaatggaatggaatggaatggaatggaatggaatgccatggactggaatggaatggaattaacaagaatggaaaagaatggaatggaacggaatggaatggaatggaatggaatggaatggagaggaggcaaaccgagtggaatgcaatggattgcaatggaatggaaaggaatggaatggaatggaatggaatgcaacggaatggagtggaatggaatggaatggaatggaatggaatcaatgcaagtgtaattgaatggaatggaatggaatggagtgaaattgattggaattgatatgaatggaatggaataaactggaatggaagggaatggaatggaatggaatggaatcaactagaatggaaaggaatggaatggaatgcaatggaatggaatggaatggaatcaacccttgtgaaatgtaaagcaaaggaatggaatggaatggaattgtatcaacaaaagtggaatggaatggaatggaatacaatggaatggaatggaatggaatggaataaactggagtggaatggaatagaatggaatgcaatggattctattggaatttaattaacccgattggaatggagtggaatggaatggaatggaatggaatggaatggaatggaaagaagccgattggaatgcattggactgcaaatgaatggaattgaaagtgatggaatggaatggaatggaatgcaaaggaatggaaaggaatggaatggaatggaatttaatggagtcaatgcaagtgtaattgaatggaatggaatcaacaaaagtggaatggaagggtatggaatagaatggaatggaatggaatggaaagcaatggagtcaatacgtatggaatcgaatagaatggaatgcaaaggaatggaatggaatggaatgcaatggaatggaatgggatgggatggaatggaaacaaaccgagtggagtggaatggaattgaatggaatggaatggaattaattggaatggaaaggaatggaatagaatggaatggaatggaatttaccagagtggaatggaattgaatggaatggaatggaatggaatggaataaattggaatggaaaggaatggaatggaatggaatggaatcaaccagagtggaatggaattgaatggaatggaatggaatggaatcaaaccgagtggaatggaattgaatggaatggaatggaatggaatggaatggaatgcaatggaatggaaagtaatggaatagaatggaatggaaaggaatggattggagtggaatggaatggaatggaatggaatggtatcaacgcaagtgtaattgaatggaatggagaggaatggaatggaattgatttgaatgcagtggaatcacctggaatcgaatggaatggaatggaattaactagaatggaaaggaatggaaaggataggaatgcagttgaatggattggaatggaatcaaccagtgtgtaaagtaatggaaaggaatcgaatggaaaggaatggaatcaacaaaagtgtaatggaagggaatggaatagaatggaatggaatggaatggaatggaatggaatggaaagcaatggagtcaacccaaatggaatcgaatggaatggaatgcaatggaatggaatggaatgcaatggaatggaatggaatggaatgggatgggatgggatgggatggaatggaatggaatcaaccagagtggaatggaattgaatggaatggaatggaatggaatcaacccgagtggaatggaattcaatggaatggaatggaatggaatcaacccgagtggaatggaattgaatggaatggaatggaatggaattaacctgaatgaaatggaatggaaaggaacggaatggaatttaatggaattgaatgtaatcaacctgagtggactggaatgaaatggagtggaatggaaagcaatggatttgaatggaatcagcaagagttgaatggaattgaacggaatggaatggaatggaatcaacccaaatggaatgtaatggaatggaattgaatggaattaccccgagtgaaatggcatggaaaggtacagaaaagaatttaatggaatgaaatggaatggaatggaatcaacatgagtggaatggaatggaatgaaatggaatgcaatgcaatggaatggaaccaataagagtggaatggattggaatggaatggaatggaatgaaagggaatagaatcaacctgagggaaatggaatggaatggaatggaatggaatggaatggaatggaatggaatggaatacaccagagtggaatggaatagaatggaatggaatggaatgaaatcaacccgagtgaaatggaatggaatggaatgggatggaatagaatggaatggagtggattggaatcaatctgagtggaatggaaaggaatggaaaggaatggaattgaagggaatggaatagaatggaatggaatggaatggaatggaatggaatggaataaacccgagtagaatgcaatggaagggaatggaatcgaatgtaatggaatggcattgaatggaatcaacacgagtagaatggaatggaatggaatggattagagtggaatggaatcaaccccaggtgaatgtaatgtaaaggaatggaatggaatggaatagaaagaactcgagtggaatggaatggtatggaatgaaacggaattgaatggaatggtatggaatggaaaggaacggtattgaacggaatggaatggaatggaatagaatccaatccagtgtaaaggaatggaacggaatggaatggaatggaatggaatggaatggaatggaatggaatggaaaggaatggactggaatagaaaaaattgcagtggaatggtatggaatgcaaagtaatataatgaaaaggagtggaatccaccaaaatggaaaggaaaggaatggaatggaatggaatgaatggaatggattagaaaggaatcaacccgagtggaatgcaaaggaatggaatgcaatggaatggaatggaatggaatggaatggaatggaatggaatggaatggaatggaatggaataaccccatgtggaatggaaagaatggaatggaatggaaagcaatggcatggaatggaatggaaaggaatcgaatggaatggaatggaatggaatggaatggaatggaatggaatggaatggaatcaacccgggtggaatgtaatggaatgaaatggaatggaaaggaatggaatggaatggaatggaatggaattgaatggaatcaaatggttttgaatcaacctgcgtggaatgtagtggattcgaatgtaatggaatcaacccgataggaatggaatgaaatggaatggaatgcaatgcaattgaatggaaaggaatggagtcatccctactggaatggaagggaatggaatggaaaggaatggaatggaatggaatgcaatggaatcaacccgactggactggaatggaatggaatgcaatggaatggaatgaaatggagtcaaaccgactggaatggaatggaatggaatacaatggaatggaatggaatggaatggaatggaatggaatggaatcaactcgaatggaatggaatggagtggaatggactggaacgaaatggaatagaatggaatggaatgcaatggaatggattgaaaaggaatggaagggaataaaatcaagtgaaattggatggaatggattggaatggaatggaatggaatgcaatggaatggaatggaatggaatggaatggaatggaatccacccaagtggaatggaatggattggaatggattggaatggaatggaatggaatggaatggaatggaatggaatggaatggaatggacttcacacgagtgcaacggaatggaatggaatggaaccaacccgagtggaatggaatggaatggaaattaatggaatggaatggaatggaatcaacccgagggaatggaacggaatgcaatgaaatggtatggaatggtgtggaatggaatggaatggaatgcaatggaatggaatcaaagcaagtggaatggaatggaatgaaatggaatggaatggaatcaacacgagtggaatggaagggaatgcaatgggatgggatggaatggaatggaatggaatggaatgaaatggaatcaacccgagaagaatggaaaggaaaggaatggaatggaatggaatggaatggaatccacccgattagaaaggaaacgaatggcaaggaatgcaatggaatttaatggaatggaatggaatggaaaggaatgcaagggcatggaatggaatggagtcaactggaatggaatggaatggaatggaatggaatggaatggaatggaatggaataccatggaatggaatagaatggaatgtaatagaaaggaatggaatggaatagaatggaatggaatgaaatggaatggaattgagtggaatggaagggaatgtagtggaacggagatgagtggaattgaatgaagtgtatttgaatggaattgaatggaacagacttgaattgaatggaaaggaatggactcgaatggaatggaaaggactggaatggaatggaatggaatttaatggaatggactctttggaatagagtccaatggaatggaatggaatcgaattgaatggaatggaatgaaatagagtcgcatggaatggaatgcaatggaatggacttaaatggaatggaatggaattgagtcaaaaggaattgactgaaatggactctagttgaacagaatggcatggacacaaagggaatgatgtggaattgaacagactcgaatgaaatggagtggaacagacacgaatggaatggaattgaatggagtcaatttgaatggaatgtaatggattgaaacggactcgaaaggaatggaaaggactcaaatggaacggaatggaatagaatggaattgaagcgaatggaatggcattgactggaatggaatggaatgtactcgaaaggcatggaatggaatggaatggactccaatggaaacgaatggaaaggaatggacatgaaaagaatggaatggattcgaatggaatggaatggactgtactggaatggaatggaatggaatgcactggattggaatggaatggaatgaaatgaaatggaacggaatggaatcgaatgagcttgaatggaatagaaattaatggaatggattggactcgaatggaatggaatggaatggaatggaatggaatggaatcaaatggaatggaatggagtggaatggagccacgtggaatcgaatggaatggaatggattcgaacagaatggaaaggaaaagactcgaatgtaatgggttggaatggaatggactctgatggaattgaatggaatggaatggactcaaatggaatagaatggaatagaactgactcaattcgaatagaacggaatggaatggactggaatggaatggaatggaacggacttgtatggaatgaaatggaaaggaatggagactaacagaacacaattaaatggaatggaatgtactagaatggaatggaatgcaatggacacgaatggaatagtatgaaatggaatcaaatggaatggaatggattggaatggaattgactcgaatggaatggacaggaatgcagaggaatggactcaaatggaatggaatggaatggagtggagtggatctgaatggaatggaatggaatggattggaatcaaatggaatggaagggattcgaaaggaatgtaatggaatggccgcgaatgaaatgggttggaatggaatggattctaatggaattgaatggtatgcaacggactcaaatggaatagaatgaaatggaatcgaatcaattggaatagaatggaatggaatgaaccgcaaaggaatggaatgtaatggaatcgactggaatggaatgcactagtctggaatgtaatggaatttaatggacacgaacagaataggacggaatggaatggaatgtactagaatgtaactgaatgtaatggattctaatggaatggaatggaatggactcgaatggaatgggttggaatggaaaagactcaaaactaatggaatgaaaaggaatggaatcatatggaatacaatggaccacagtggaatggaatagaatggattggaatggaatggaatgtcatggaatggaatggaatggaacagaatgccatggaatggaatagaatggaatgcaatggaatggaatggaatggaatggaatgttttggaatggagacgagtggaatggattggagtggatttgaatagaaaagaatggaatggaatgcacttgaagggaatggaaaggaatgaactagattgaaatggaatggactcgaattgaatggaatggaatttaatggaatgcactctaatggaatggaatctaatggaatggaatggaatggaaaggaatagaatggaatggaatagaatggaatagactcgcatgtaatggaatgcaatggaatggaatggactcaaatggaatggaacagaactgactcgaatggaactgactggaatggactcgaatggaacagaatgggatggacttgaagggaatggtgtggaatggaatggactcgaatggaatggagtggaatggactcgaatggattataattgaatggatacgacttgaatggaaggtaatggaatgaaatcgcctcgaacggaatctaatagaatggaatggaatggtctcagacagactggaatggaatgcagtggaatggactcaaattgaatggaatggaaaggacctgaatggaatggaatggaatggaatgtactcggatggaattgaatggaatggacaagaatggaatagaatgggatggactcaaatggaattgtgtggaatgcaatggactccaacggattggagtggaatggaatcgaaagaatggagtagaattgactcgatgtgagtgggaagaaatggaatgaaattgactcgaatgggatggaatagtctcggacggaatggaatggaatggaaaggaatggaatggaatgcaatggaatggaatagactgtaatggactcaaatggaaaggaatggaatggaatggactcgaaagaagtacaacgaaatttaatggaatggactctaatggaatggaacggcgtggacaaaaatggactaaaatgcactggactcgaatggaatggagtgcaatggaatggactcgaacaaaatagaatggaatggattcgaatggaatgaaatggaattgaatggactagaaaggattggaatgcaatgcaatggaaaggactcgaatggaatggaatgcaattgactccaatggaattgaatggattggacctgaatggaattgaatggaattgaatggaatggaatggaatagaatgggaaggaatggaatgcaatgaaatggaatggaaaggaatggaatgggtatgaaaggaataaaatggaacggaatcaaatggaatggattggaattgaatggactcgaatggaaattaatggaatgtaatcaaacggtatggaatgcaatggaatggactcgaataaaatggaatcgaatggactcgaatgtaatggaatggaaaggattgaaatgttatagaatggaatggacttgaatggaatggagtggaacggaatggactcgaatggaatggagtacattgcaaacgatttgattgcaatggaaatgaatgaactcgaaaagaaaggaatgtaacagaatggaatgtactcgaattgaatggaaggtaatataatgaaatttactcgaatggaattgaatggagtggaatggaatcgaacagaatgcaatggaacggaatggaaaggaattgactagaatggaatttaatgaaaaggaaaggaatggacttcaatggactataacggaatggaatggaaagcaatcaaagaaaatggaatagaatgtactcgaatggaatggaatggaatggaatggactcgaaggaaagggaatgaaatttaacagaatggactttaatgaaatggaatcgatgggaatggaatggaattgactcgaaagtaatggaatgcaatggaatggactcaaatggaatggaaagggattgactcaaacggaattgagtgaaatggacttgaatggaatggaatggaattgactcgaatggaatggtgtggaatagaagggactggcatggaatggagaagaatggagtgcacttggaacaaataatatggaatggaaatgaatggactcgaatagaatggaatagaatggaatgcaatggaatatactcaaaaggaacgtaaggtaatggaatgaaatttactcaaatgaaatggaatgtaaaggaatggactctaatggaatgcaatggaatagaatggaatggagtccactcgagtggaatgcaactgaattgaatgggctcgaaaggaatggaaaggaatggaatggaatggaatggaatggaatggaatggaatggaatcgaaaggaatggaaaggattctaatggaatggaatggaaatgactcgagtggaatttaagggaatggattggactcgaatggaatggaatgagatggacaggacaggaaagtaatggaatggaatggactctaatggaatggaatggaaaggaatggaatggactcgaattgaatggattggaaaggaatggaatgcactcaaacggaatggaatggaattgaatggaattgaaaggaatggaatggacaggaatgcaatggaatggaatggaatggaatggaatggaatggactcgaatggaatggaaaggaatgggctcgaatggaaagtaaagaactcgaatggaatggtatggaatcgacgcgagtggaatgtaattgaatggaatggaattgactgtaatacaaaggaatgcaaagaacacgaatgaaatagaatgcaatggaatggatttgaatggagtggaaaggaatggactcgaatggaatggaatggaatggaatggattggaatgaaatggactggaatggaatggaatggaatgaatggaatggaaatgactcgaaaaaacggaatgaaatggacacaaacggaatggaatggacttgaatgaaattgaatggaatggtctcataagtaatggagtgcaataggctcgagtggaatggaatggaatgcaatggactcgaatggaatgaaaaggaatagaaatgactcgaattgaatggaatggaatggaatccaatgcaatagaattgattggaattcacatgaacggaatagaatacaatggagtcaaatgtaaaggaatggacatgaatggaatggaacggactcaaatggaatatagtggaatggaatcgaatggaatggaatgcaattgaatggactcgaatggaaaggaatagattggattcgtgtggaatggaatggaacggaatggaaaggaatgtatgcgaatggaatggaacggaatggaaaggaatgtatgcgaatggaatggaacggaatggaatgcattgcatccgaaaagaatggaatggaatgcaatggaatggaatcgaatggaaaagaatggaaaggactggaacggaatggaatggaatggattggaatggaatggaatggtatggaatataatggacttcagtggaatagaatgtaatggaaaggaatggatttaaaaggaagggaatggactctaactgaatggaattgacaagaatggaatgcaatagaatggaatggaatacaacggaatttaatgtaatggaccgtaatggaatggagtggaatggaatggactcgaatggaatggaatggaattgacttgaacggaattgaaagcaatggacccaaatggaatgcaatggaatggaatggaatggacacgaatggaatgcaatggagtgtatcggactcgaatgtaacagaatggaatagaatgcaatggaaaggaatggaatagattcaatcggaatggaatggaatgaactcgaatcgaatggaatacaatggattggactcaaatggaatggaatagaattgaatggattcgaaaggaatggaatgcaatggaatctaatgaaatggtttggaatggaatggaattgaatggaatggactgaaatggaatagaaaggaatcgaatggagtggaatggattagaatggaatggactcgaacggaatggaatggattcgaatggaatggaatggactcaaatggaatagagcggaatgtaatggaatgtactagaatggaatgcaatggaatgaactcgaacggaatacaatggaatagaattaaatggaatggaatggacctgaatgaaatggaatggattcaaatggaatggaatggacccgaatggaatggaatggaatggaatggaaacgactcgagtggaatgaaatggaatggaaaagacacgaatggattggaatggaatggacttgaatggaatggaataaaatggaatggaatggacttgaatggaaatgaatgggatggaatggaatggactcgaagggaatggaatggaatttattccaatgtaattgaaaggactcgaatgaaatttaaaggaatttaatggaatggaatcaaatgcaatcgaatggactcgaatggaatggaatggaatggaccaaccttgaatggaatggaatggaatggaatggaatggaatgaaatggaatggaatagaatggactctaatgtaatgcaataggatggaattgaatggaatggaatggactcgaatggaatggaatggaatcgacccaagtttaatcgaatggaatggaatggtacggactcaaatggaaaggaatgaaatggactggaatcgaatttaatgaaatggaatggaatggactcgaatacaaaggaatggaacagaacaaaaaggaatggaacggaatggaatgcacttgaatgatttggaaaggaatggactcgaatggaatggaatggactataacggaatggaatggaatgaaatggaatcgaaaaaacagaatagaatggaatggaatggattcgtgtagaatggaatggaatggactcgagtggaataaaatccaattgaatggactagaaagtaatgaaatggaatgctatggaatggaatggaatggattcgaatggaatacaatggaatggattggaatggatttgaatggaatggaatggaacggacttgaagggaatgaaatggaagagaatagaatggaatggaatggactcgaaaggaacggaatggaaaggactcgaatggaatggattggaatggaaaaaatcgagtggaatggaatgaaagagaatggactcgaatggaatggaatggaatggaatggaatggaatggaatggacacaaatggaatggaaaggaacggacccaaatggaatggaatgcaatggaatggaatggaattcaatgcaatggaattgaatggaatggacttgaataaaacggaattgaatggatccgaaaggaatggaaagcaatggaatggaaaggaatggaatggaatggaatggagtggaatggaatggagtggaatggagtggaatggaatggaatggaatggaatggaatggaacggaatgcaatacactggaatggaatggaatggaatggaatggaatggacttgaatggaatacagtggaacttgatggaacggaacataatggaatggaatggaatggattcaaaaggaatagaatggaatggactcgaatggaatggaatacaaaggaaaggactcgaatggattggaatggaatagaatgcactcgacaggaacggaatgcaatagaatggccttgaaaggaatggaatggaattcaatggaatggactcaaatggaatggaaaagattggacccgaatggaatggaatgcaatttaattgacttgaattgagttgattcgaatttattcgaatgaaattgaatggaatataacggattcaaaagtaatagaatggaatggaatggacttgaatgtaatggactagaagggaatggaatggacatgaaagcaatggaatggaacggaaaggagttgaaaggaatacaatagaatgaagtggaatgggctcgaaaggaatggaatggaatggactcgaatggaatggaatgcaatggaatagactataatgaaatggaatggaatttactcaaagggaatagaaaggaatggaatcgaaaggaatggaagggaatgaaatggaatcgaatgggttgaaatggaattgatttgagtggaatggaatggaatggaatcaaatggaatagaaaggaacggaattgacacgaaaggaatagagtggtactgaatcgaatggaatgaagtggaatgtaatcgaatggaatagaatggaatggactcgaatggaatgcagcggaatggaatggacttgaatgaaatgaagtagaaaggactagaatggaatagaatggaattgaaaggactcgaatggaatggaatgtaacggaatggaatagagtataatggaatggaattgaattgaaagtactcgaatggaatggaatggaatggcatggaatggactcgtatggaatgcaatgtaatgcaaagaaaaggactcgaatggaatggaatgcaatgcaatgaaatggaatggactcgaattaaatggaatggaattgaatggaatggactccagtgaaatgcaattgaatggaatgcactcgaaaggaatcgaatggatttgaatggaatggaatggacttgaatggaatggactcaaatagaatggaatggaatggacacaaatggaaaggaatggactcgaatggaatggaatcgaatcgaatcgactaaaatggaatagaatgcattggaatggacttgaaaggaatggaatggaatggaatggacccgaatggaatggaatggagtggaatggattcgaatggaatgaaatggagtggaactgaatggaatggaaaggaaatcaatggaatagaatggaatggaaagtactcaaatggaatagaatggaaagggctcgaatggaatggaatggaatggaatggactcaaatgaaatgaaatggaatgcactcgaatggaatagaatggaatggagttgaattgaatgcagtggaatttaatggacttgaatggaatggagtagaatggtctagaatggaatggaattgaaaggatacgaatggaatggaatgtaatggaaaggaatggactacaatggaaacgaattgaattgaaaggactcgaatggaatggaatgcaatggcatggaatggacgcgaatggaatgcagtgtaaggcaaagaaatggacttgaatggaatggaatgaaatacaatgaaatggaatggactcgaatggaatggactccaatggaatgcaattgaattgaattgactagaaggaatcgaatggattgcaatggaatggaatggactggaatggaatggactcaaatggaattgaatggaatgaaatcgaatggaatggagtggtgtcgaaaggaatggaatagaatagaatcgactaaaatgaaatggaatagaatgcactcaaaagaatgaactgcaatggagtcaaatggaatagaatggagtagaatcgaaaggaatggaagggaatggaatggacttgaatggaatgtaatggacttcaatggaatagaatggaatggaatggattcgaacggaaaggaatggaacgtactcaaatggaatggtatggagtggactcacattgattggattgggatcgaatggaatggaaagaaacgtacccaaattgaatggaatggaaaggcatggaatggaatggaatgtaacggaacggaacagaacggaacagaatggaatggaatggaatggactggaatggattgtaatggaatggaatgaaacggaacggaacagaatggaacggaatggaatggaatggaatggaaaggaatggaatggactagtttggaaaagaatggaatggaattgaatggactcgaaagtaatggaatggaatcggttcgtgtggaatggaatggacacgaatgtaaaggaatgtaatagaactgactcaaatggaatgcaacggaatttaaaggaaaagacactaatggatagaaatggaatggagacgaatgaaatagaatggaaaggaatccaatggaatggaatgcaatacaatagaatcaaatgggagggactcaaacacaatgtaatagaattgaatgttgtcgaaagggaaggaatgtaatgcaacgaaatggactcgaatggaatggaatgcactggactcgaatggaacggaatggaatggactcgaatgcaatggcatggaatggaatgaaatgcaatggaatggaatggatttgagtggaatggaatgtataggaatggagtcgaattgaaaagaaagaaaaggaatagaatcgaatggaatggaatggacccgcatagaatggaatggcatcgaatggaatggaattgactgtaggggaatggaatagaatgaaatggaatggaattccttgaatggaatagaatttaatggaatgcattgtacgccaatggaatggaaagttatggactcgaaaggaaagcaatggaatggtatggacttcaatggaatggaatggaaaggaactgaatgaaacggaatggaatggaatggactcgaatggaatggaatggaatggaacggaatggaatagaatggaatggaatgtactccaatggaatgaaatggaatggatcggactcgaatggaatggaatgttatggaatggactcgaatggaatgaaaaggaatgaaaaggaatggacttgaatggaatgaaatgaagtggcatagatttgaaaggaatggaatttaatggacctgaatataatgtattagaatgaaatgtaatggactcgaatggaatggaatggaatggatgggaatggagtggaattgaatggaatggaatggaacggaatttaatgaaatggaatcgaattgaatgggatggaatggacccgaatcgaatggaatggaatggaatggaatggaagggaaaggaagggaatggaacggaatggaggtgaacggaatggaatggaattgaatggacttgaaaggaatggaatggaatggaatgcaatggaatggaatgaaatgaaatgtaatggactctaatggaatggcctagaatgggcacgaatggaagggaaagaactggaatagaatgaaatggtatgaaatcgacccgattctaatggaatggaaaggaatggaatggacttgattggaaaggaatggaatgttcgtgaatggaatggaatacaatggaatgaaatcgactctagtggaatgaaatggaatggaaaggaatcgaatgaacttgaatggaatgtagtggaatggaatcgactggaatgcaatggaattgaatggactcgaataaaaaagaatgtaactgtatggaatggactcgaatggaatggaatgcaatggaaggaaatggacttgaatagaatggaatggtatggaatagagtggaatggaatggaatggactccaaaggaatggaaaggattggaatggaatggaatggaatggaatagactcgaatagaatggcatggaatggactcaaatggaatagagtggactcgcatgaaattgaatggaatggaaacgattaaagtggaatacaatgaaatgaaatagactggagtcaaaataactgaatggacccaaatgtaatggaatggaatggaatggaatgaaacggactcgaatggaagggaatggaatggactggaatcaaatgcaatgaaacataatggaatggagttgaatggaatggaaaggaatggccacaaatggaatacaatggaatggaaaggaatggtatggaatggaatggaatgatacggactggaatggaatggattggaataaaatatacatgaatggaaaaaaggtatggaatggaatggacccaaatggaatggaatggacacgaatgaaatgaaatagaatagaatggactcaaatggaatacaatggaatttaatagaatgaacactaatgtaaaggaatggaaggcactctaatggaatagaatggaatggacttgaacggaattgaatggaatagactcgaatggaatagaatagtatggatttgaatggaatggaatgcaatggaatggactcaagtagaaaggacaagaatgtaatggaatggaattgaattgatccgaaaggaaaggaatggaatgcaatggaacggacttgaatggaatggaatacacaggactcgaatggaatggaatgcaatggaatggacttgaatggaatggaatggaatggaatggaatggataggaatggaatggaatagaattgaatggactcgaaaggaatggaattgaatgcaatggaatggactcgaatggaatgtaaaggaatggacccgaatataatggaatgcaaacgaatgaactcgaatggaatggaatgcaattgtctcgaatggaattggatggaatgcaatggacttgaattgaaggcaatagaatggaatcgaatggaatggaatgaactcgactgcaatcgaatggaatggaatagactcgaatggaatacaatggaatgaaagggaatggactgaattggaatggaatggaatggagtcgattagaatagaacagaacggaatcaaaaggaatggaatgcaatgaaatggaatcgagagtgttggaatggaattatcatgaatggaatgaaatggaatggacacatatggaatacaatggaatggaatggatgctaatggaatggaatggaatggacacgactggaatggaatggactcgaaccaaatggaatggaatggaatggactcgaatggaatgaaatggaattgaatggaatggactgaaatggaatggaataaaatggacttgaatggaagaaaatggaatggatatgaacagaatggagtggaatggaatggacttcaatggaatggattcggatggactccaatggaatggaatggaatggaatggactcgaatggaatggaatgtaacggaatgaaatggactcgaattgaatggaaagaaatggactcaagtgaaagggaatggaatggaatgaaatggactcgaattgaatgcaattgaattgaagggactcaaaaggaatggaatggatttaatggaatggaatggaatggaaagtaatggacccgagtggaatggaatggaaagaactcgaaaggaattgaatggaatggaacccaatgaaatgtaatggaatggaatggaaatgcatggaatggattcgaacggaataaaatggaatggaatggaatggaatggattcaaagggaatgcaatggaatggaatggaatttaatttaatgaacggactctaatggaatggaatgtactcaaaagcaatagaatggaatggatttgaaacgaatggaatataatggaaagggctcgaatttaatggaattgaatggacttgaattcaatataatggaattcaatcgaatggaatggaatggacacgaatataatgcaatggaatgcaatagaatggaatagaatggactcgaatggaatggaatggaccaaaatggaatggaacggaatggacccgaattgaaaagaatggaatggactgcaatggaatgcaatggaatggaatggaatggagttgaatggaatagaaaggaatggattcgaagggaatgaattggaaaggactagaattgaatggaatggcctcgaatagaatggaatggaatttactagaatggacactaatggattggaatctaatagaatggaacggcatggactctaatggaatggaatggaattgaatggactataaaggaatgcaatggaatagaatggaatggagttgaatggaatagaaaggaaaggaaaggaatggatttgaagggaatggaatggaaaggactcgaattgaatggaatggcctcgaatagaaaggaatggaatttaatagaatggacactaacggattggaatctaatacaatggaatggcagggactctaatggaatggaatggaattgaatggactataaaggtatggaatggaatggaatcgaattgaatggaatggaacggaccgaaatggaatagaatggactcgaatggaatggaatggaatggaatggaatggaatggaatggaatggaatccaatggaatgcagttgaatggaatggacttgaaaggaatggaatggaaaggaatggaatggaatggaatggaacggaatggaatggaatggacttgaatgcaatggaatgaactagaatagaatggaatggaattgaatcaactcaagtggaatggaagggaatggagtggactcaaaggaaatggaatgcaatggaaagtactcgaaaggaatggaatgtactggacccgaatataatggaatggaaaggaatggaacggactcgaatggaatggcatggaatcgaatggactcgaacggaatggaagggaaggtaacggactcgaatggaatggaatggcatggaatctaatggactcgaacggaatggaatggaaggtaacggactcgaatggaatggaatggaatgaaatggaatggacttgaagggaatggaatggaatggaatcgaatggaatagaatactatggattcgaatggaaaggaaagtaacggaacggaatggaatggaatggaaaggaatggaatggaacggactcgaattgaatggcatggaatggaatgcactcgaatgtaatgggatggaatggaatgaaatggaatggaaaggaatggaatccaatggaatggaaagcaatgggacgagtggattggaatggaatggaatggaatggaaaggaatgaaatggactggaatagaatggaattgtttggaatggaatgttcttgaattgaatagaatggaatgaaatggaatgtacccaagtgaaatggattggaatggacacgaatggaacggaatggaatggatggaactcgaatggaatggaatggactcgaatggaatggaatagaacggaatggaatggaatggaatgtactcgaatggaatggaatggcctcgaatgtaatgtaatgaggaagaatggaccagaaaggaatgtaatgcaatggaatggactgaaatacaatggaatggaatgaaaaggacatgaatggaatagaatggaatgaattggaatggattggatcaaatggaattgaatggaatctactcgaatggagtggaatggactcaaatggaatggagtggaatgggacggtgtcgaatacaatagaatataatttaccggattggactctaatgcaatggactctaaaggaaaagaatggaatggactcgaatgcaatagaatggaatggaaaagtgtcaaatggaatggaatggaatttacacgaatggaatggaatggagtggaatgaaatggactggaatggaatggaatggaatgattggaatggaatggaatggaatggaatggaatggaatggaatggacttgaatagaaaagcatggaatggaatggatgggactcgaatgaaatggaatggaatggaccagaatcgaaaggaatggcctcgaatgtaatgtaatgaggaagaatggaccagaaaggaatgtaatgcaatggaatgaacagaaatacaatggaatggaatgaaaaggacctgaatggaatagaatggaatggaatggaatggattggaatccaatggaattgaatggaatggactcaaatggagtggaatggactcaaatgcaatggagtggaatgggacggtgtcaaatgaaatagaatataatttaccggattggactctaatggaatggactctaatggaaaagaatggaatggactcgaatgcaatagaatggaatggaaagttgtcaaatggaatggaatggaatttactcgaatggaatggaatggagtggaatgaaatggactggaatggaatggaatggaatggaatggaatgaatggaatggaatggaatggacttgaatagaaaagcatggaatggaatgaatgggattcgaatgaaatggaatggaatggaccagaatcgaaaggaatggattggactcgaatggaatggagtaaaatggactcgagtggaatggaatgcaatgcaatggactcgattggaatggaatggaatggaatggaatggaatggaacgaactcgaatgcaaaggaagggattggagttcacttgaatggaacagaatggaatggagtagaatgtaatggaatgaacaggaatggaatggaatataatggaatggactcgaatggaatagaaaggaaaataatctagtggaatggcatggaatggaatggacacaaatggaatggaatggaatcgaatggaatggaatggaatggaattcaatggactaggatgtaatggaattgaaaggaatttaatggaatggacttgaatggaatggaaaagaatggactcgaatggaatgtaatggaccagaatggaacggaatggaatggacacaaattgaaaggaatggaatggaatgaaatagactggaatggaacacaatggaatggaatggaatggaatggaatggaatggaatggaatggaatggaatggaatggatttgaatgtaatagaaaggaatggaatcaaagggaatggaatggattgcactcgaatggaatggattgcaatggattcaaatggaaaggaacggaattcaatggactcaaaaggaatggaatgtaacggaatggaatggactccaatggaatggaagttaatggaatgaaatggactcgaatggaatggaatggaatggaatagactcgaatgcaatggaatgcattggaatggattggaaaggaaaagactcgaatggaataaagttgaatggaatggactcgaaatgaatggaatggaatggaattgaatggaatggaatggaatggaatggactcgaatggaatggaatggaattgacccaaatggaatggattggaatggaatggagtagattggaatggattggaatgttatgcaatggagaggaatggaatggaatgcaatgcaatggaatggaatcgaatggaatagaataaaatgaaatggattttaatcgaagggaaagcaatggaatggttacgaatggaatggaatggaatggaatggccatgaatggaatggaatggaatggaatggaatggaatggattggaatggactggactgcaatggaatggaacggaatacacttgaatgaaatagaatggaacgcaattgaatggacttgaaagaattggattggattggaccagagtggaatggaatggaatggactcgaatggaatgcaatggactagaatgtaatggaatggaatggaatggaatggaatggacacgaattgaatacagtgaaatttattctaacggaatctaatggaatggaatggattggagtcgaatagaacagacacgaagggaatggactgcaatggaatggacttgaattgcatggaatggaatggaatggacttgaaaagaatgggatggaatacaatggaatggactcgaatggaatgcaatgcactggaatggactcgaatggaatggaacggatttgactcaaatggaattgaatggagtgcacctgaatggaatggagtggaatgggatggaataaaatggaatagagtgggctcaaatagaatggaatagaacggaatggaatagaatgcagtggaataaaatgggtttgaatggaatggactgcaatggaatcgaatagaacggattcaaatggaataacatagaatgcaatgtactcgaatgcaatggaatggaacggactcaaatagaatggaaaggactcaaacggaatggaatgaaatggactcgaatgggattgaatggcatttaatgaagtcgaatggaatgcaatataacggaatggaatgaactcgaattgaatgcaatgtaatggaatgaaatgtgctcgaatggaatggaatggaatagagtggaatggaacggaagagaatggatcgcaatggaatggaatggaatgcaatggagaggaatgcaatggaatgcaaaggaatggaaaggaatcgagtggaatagaacagaatgaaatgtattgtaatcgaacggaatggaatggaatggtttcgaattgaaaggagtggactggaatggaatgaaatggaatggaatggactggaatggaatggacttgaatggaatagaatggaatacagtggaatggacctgaatgaaatggaatggaattgacctgaatggaatggaatggaatggagtcgaatggagtttaatggacttgaatggaaaggaatggaattgcattgaatggactcgaatagaataaaatagaatggctctgaatgcaatggaacgtaatggaatagactccaatggaatgcaacgatatgggctcgaatggagtagaatggagttgaatggaaagtaacggaatggaatggagtggaatggaaaggaatggaatggtatggaatttaatggactcgaaacgaatgtaatgtaatggaatagaatagactagaatggaatagaatggaagggaatggaataaaatggaatggaatggaatggggtcgactagagttaaatgaaatggaatggaattgaatgcacttgaaaggaatggaatggaatcatctcgaatggaaaagaaacgaatggactctcatggaatggaatgcaatggaatggactcgaatggaatgcagtggaatggacacgaatggaatggaatggtatttaatagaatggaatcaaaaggaatgcaatggaatggaatttaatggaatggactcgaatgtaaaaaatggaaagcactcgaatggaatggattggattcgaatggaatgaaacggactcgaaaggaaaggaatggagtgcaaccgaatggaatggaaagctatggaatggaatggactcaaaaggaatgggacataaggggatagaattaactcgaatggaatggaatgtaatggaatgaaataagctcgaaaggaatgcaatgcaatggactcgaatggaattgaatggaacggaatggaatggaaagtaatggaatgcaatacaatggaatgcactcgaatggaatgcagttgaattgaagggaccagaaaggaatggaaaagaatggaatggagtggaatggaatggaatgcaatgcaatggactctgagggaatggaatggaatggactctaatggaatggaatggatggactcgaattgaatggaatggaatcgagtggaaaaaaaagaatggacccaaatggaatggaacggaatggattggaatggaatggaacacaatggagagaaatggaatggaattgaatgcactcgaatggaatagaacggaatgtctccgaatggaatggaagggaatggaaaggactcgaatggaatgcaatgaaatggactcgaatggaatgcaaagcacttgagaattgaatggaatcaaatggaatggattggagtgggatggaatggaatggaatggaatggaatggaatggaatggaatggattggaacggactcgtaagtgatggaatggaatgcaaaggaatggaatgcaatgaaatggaatggaatgaggccgaatggaatggaatggaattgaatggatttgaaagtaatggaatggaatggaatggtttcgaatggaatagaatggactcgaatggagtggaacagattggactcgaatggaatggaatgaactcggttggaatggaatggaatggtatcgactagagtggaatgccatggaatggaaagaaatgggctcaaatggaatggaaaggaatggaatgggctcaaatggaatggaattagatggaatcgagatgagtggaatggaacagtatggaatggaatggactacaatggaatggaatggaatttactcgaaaggaatagaaaggaatggactcaaatggaatggaatggaaaggaatcgaactgaatggagtggaaaggactaatggaatggaacggaatggaatggaatggaatggaatggaatggaatggaatggaatggactcaaattgaactgaacgtattggtatggagtggactcgaattgaatggaatgtagtggaaataattgaactcgaatggaatggcatggactcggaatccaatcgatttgaaagaaatggaatgaaatggaatggaatggaatggaatcaacccaagtggaaaggaatggaaatgaatggaaaggactcgaatgaaatggaatgctgtggaatggactcgaatgctgtgtaatggaaaggaatagactcgaatggaatggaatggaatggaacggaatgaacacgaatggaatttaatggaatggaaaagaatggaatggagaggaaaggaatggaatggaataaaatggaatgaaagagaacggaatgaaatggaaagcaatgaaatgaaatggagaggaatggaataaaatgcaaagcaatggaatggaatggaatggaatggaatggaatggatgggaatcgaagggaatggaacggaaaggactcgaatgcaatggaatggactcgaatggaatagaatggaatagaatggactaaaatggaatagaatggaatttactggattgcaatctacagtaatgtactctaatggaatggaatggaatggactctaatgaaatggaatggaatgcaatggacaagaatggaatggaatggaatggacacgaatggaatggattggaagggaatggaatggaatagaatggattggaatggaaaggacgtgaaaggaaaggaatcgaatggaatcgaatggcatggaatggacacgaaaggaacataattgaatggagtggacttgaaagtcctacaatggaattcaatgtaacagactccaatggaatggaaaggaatggactcgaatggaatataatagaaaaggcacgaatggaatggaatgcaatggaatggtctcaaatggaatggtatggaatggactcaaatgaaatggaatggaattgaattgacttgaaaggtatggaatggaatgcattggaatggacgcgaatggaatggactcaaaaggaatggaaagcaatggagtggactcgaatggaatttaatgggacacgaatggaattgaatggaatggacacaaatggaatggaatggaatggactcgaattgaattgaaaggaatggattgcactcaattggaatggaatttaatggattcgaaaggaatggaattgaatggactggaatggaatggattttaatggaatggactcaaatgcaatggaatggaatggattcgaatggaatgtattggactcaaacggaatggagtggaatggtctcgaatgaaatgcaatggaaatgaatggaatcgaatggaatggaatggaacagaatggaacgaactcgaatggaatggaatgtaacggaatgaaatggactcgaatggaacggaatggacacaaattgattggaatggaatggaatggaacggaatggaatggaatggaatggattggaatgcacccgaatggaatgcaacagaattgaatggacccgaaaggaatagaatggaatggaatggaaaggaatcgaatggaatttaatggaatggactcgaatagaatggaatgaaattgaatggtcttgaaatgaattgaatggaatgcaatggaatggactagaatggaatggaatgtaatggaacagacacgaactgaacagattaaaattgattgcgctcagttggattggaatggaattgcatggattctaattggaatggaatagaatggacaccaatggaatggaatgaaatggactggagtacaatggaaaggaaaggaattgaattgaatggaatggacttgaatgcaatggaatttaatggatccaaatgaaatggaatggaatgaaatggaatggaatggaaaggaatggaatggaatggactcaaaagtaatggaatggaatggaatccaaaggagtggaatggactcgaatgtaaagtaatggaacttaatgtaatggactcttctggagtggactcttatggagtgaactagaaaggaattgaatgtaatggattcaaattgaatagaatgaaatggaatggaatcgaatggaatagaatggaattcactcaaatggaaaagattggaaaggacacaaacggaatagaatggactggaattgaatggaatggaatggaatcaaatggaatgcagtggaaagaaatggactccaatacaatggagtgaaatggactctagtgtaatggaatggaattgaacggactcgaatggattggaatgtattggaatggagtggacacgaatgcaatggaatgcaatggaatcaaatggtatgaaatggaaaggaatgcactcgaatggaatggaatggaatggaatggaaagaatggacttgaatggaatgtaatggaatggagttgaatggaatggaatggactcaaatggattcaaacggaatggaatggaatggaatggaatggaatggaatggaatggaatggaatggaatggattggactcgaatggaaaggaggggaatggtctcgaatggaatggaatggaaatgaatggactcaaatggaatggaaagtaacggaatggaatgaactcgaatggaatggaatgtaacggaacgaaatggactcgaaagtaatggaatggaaaggaatggattcaaattgaatggaatggaatggaatggaatggattggaatggacacgaatggaatacaatagaattgaatggacacaaagaatggaatggaatggaagggaatcgaagggaatcgaatggaattgaatggaatggactcgaatacaatggaatggaattgaatggtctcgaaatgaatggaaaggtatgcaatggaatggacccgaattgaatggaatgggatggaacggactctaattgaactgcagggaattgattggtctcaaatggaatggaatggattccaattgaatggaatggagtggaagggactcgaatggaatggaatgaacttgactgcaatagaatggaaaggactctaatgcaatggaatggacttgaatggaatggaatggacttgaatggaatggaatggagccgaatggaatggaatggaatggaatggaatggaatggaatggaatggaatggaatggaaaggaatggaatggaaaggaaggtaatggaatggaatggattggaatgcaatgcactagaatggaatagaatagaatggaatggaaaagacaaaaaagtaatggaatggatttcaaataaatggaatggactcaaatgtaacggaatggaatttaacgaaatggacacttgtggagtgggatggaatggactcgaatggaatgggtttcaatggaatggactagaaaagaatggaatggaatggtttcaaattgaatagaacggaatcgaatggactagaatggaatgcaatggaatggaatggactcgaaaggaaaagaatgtaaaggactcaaatggaatagattagactagaattgagtagaatggaatggaatggaatggaattgacaccaatggaatggagtaaaatggactcgaatggaatggaatggaattgaagggactcgaatggattggaatgtgttggaatggagtggacacgaatggaatggaatataaaggaatcaaatggaatggaatggattggaatggaaaggaatgcactcgaatggaatggaatggaatggaatggaatataatggaatggaaagaatgcactttaatggaatggaatggaatggactcgaatggaacgaatggaatggcctcgaatggactcgaacgtaatggaacggaatggaatggactggaatggaatggtatggaacggaatgaactcgaatggaatagaatggaagggactcaaatggaatggtgaggaaaggagtggactcgaatggaatagagtggaatggaatcaaatggaatggaatagaattgaatggagatgaatggaatggaattgaatggaatagaatgctctccaatggaatggaaaggaacggaatgaaatttactcaaatgaagtggaatggaatggaatggaatcgaaagaatggaatggaatggaatggaatggaatggattctaatggaatgcaactgaactgaatggacgcgaaaggaatggaaatgaatggaatggaattgaatagactagaatggattggaatggaatggaatggaatcgactcgagtggaatggaaaacaatggatattaatgaaatgcaatggaaaggaatggtctcgaatggaatggaatggaatggaatggacctgaatggagtggaatggaatataatggaatggaatggatattaatggagtggaaacgaattgattcgaatgaagtggaatataacggaatggaatcgaatggaattgaatggaatggaatagactagaatggaatggaatggaatgcactcgaatggaatagaatggactcaaatggaatggattggaatggacccaaatggaatagaatggactggaatgtaatggaatggaagacaccaaatggaatgggatgggatggaatggaatggaatggaatggaaaggagaggaatggaatggaaccgactcgaatggaatggaatggaatggactcgaatggaatggaaaggaatggaatggactcgaattaaatggaaaggaatggaatggatttgagtggaatagaatggaatggactcgaatggaatagaatgcacttgaatgcaatggaatggaatggaatggacccgaatgaaatggaaaggaatggaatggatttgaatggaatagaacgaacttgaatggaatagaaaggaatggaatggaaaggatttgaaaggaacagaatggaatgaacttcaaaggaatggaatggactcgcatgcaatggaatggaatctaatggaatggacacttatggagcggaatggaatggactcgaatggaatgggtttgagtggaatggactagaaagtaatggaatggaatggattcaaatggaatagaatggaatggaatggacttgaatggaatggaatggaatggatacgaatagaattgaatggactccagtagaatggaattgaatgtaatggactcgaataaaatataatggaatggaatggaatggactcgaatggaatagaatggaaaggattcgaatggaatagactggactcgaattgaatagaatggaatgcactcaaatggaatggagtggaatggaatcgagtcgaatggaatggagagaaacagactcgaatggaatggaaaggaattgaatggactcgaatggactggaatgtgttggagtggaatggacacaaatgtaatggaatgtaatggaatcaaatggaacggaatggagtggaatggaaaagaatacactcgaatgcaatggaatagaatggactcgaatggaatggaatggaatggactcgaacgaaaagcaatttatttgaatggactcaaaaggaatggaaccgaatgaaatggaaaggaatggaatggaatggaattaaatggaacggactcaaatggaatggagtgaacttgattggaatagaatggaatggactggactggaatggaatggaatggaatgcaatggaatggactcaaatagtattggatggaattgaatgcactcgaatggaatggaatggaatggactcgtgtggaaatggttttaatggattgcactagaaaggaatggaatggaaacgaatggaaagaaatggaatggacgagaacggaatggaatggactcgaaaagaatggaatggaatggaatggaagggactagaaaggaatagaatggaatgcaatggaatggactggtatggaatagaatggaatggactcgaatgtaatggaatggaatagactcgaaaggaatgagatggaattgaatggactcaaacggaatggaatggaaaagactcgaatgtaacaggttggaatggaatggactcgaatggaaaggaatgcaatggactcgaatggaatggaatggaatggactcggatggactcgaacgaactggaatgggatggaaaggaagcgaatggaatggaatggaatggaaagaattcgaatggaatacaatggagtggatggagagggaatgagtggtatcaaatgaaatggagtggaatggaagaaaatggaatggaatagaattgaatggagatgaatggagtggaatataacggaaaagaatggactggaatggaatggaatgaaatggaatgaaatttacccaaacggagtggaatggaatggaacggactcgaaaggaatggaatggagtggaatggaatggaatgcattctaatgaaatgcaactgaattgaatggactctaaagaaatggaaaggaatggaatggaatgcaattgactcgaatgaattggaatggaatggaatgaaatggaatggaatggaatggattgaatggaatggaattgagaggagtggaattgaatgggtttgaatggattggactcaaatggaatggaatagaaaagaatggattcaaatggaatagcatggaattgaatggactcgaatgcaatggaatggactggactcgaatggaaaggaatggactcgaatggcatggagtgggatgtactcgaatggaatggaaaggatttgaattgaatagaatgaaatggaacataacggaatggaatgaactacaatggtatggaatgtaaaggaaagaaaagaactagaaaggaatggaatggaaaggattggaatggaatggaatggagcagaatggaacggattggaatggaatggaaaggaatggactcaaatggggtggcatggaatggaatgaaatctaaaggaatggaatgttatggacacgaatggaatggaatggactcgaatgaaatggattggaatggaatggaatgtactcgcatggaatagaatggaatggaatggactcgaaaggaatggaatggacacgaattgaaaggaatttaacggaatggaatggaatggaatggaatggaatggaatggaatggaatggaaagcaatagaatggaaaagagtagcaaggaaaggaatggactttaatggaatagaatggaatggaatggaacggactcgaatgaaatggaaaggaattgacgtgaatggaatggaattgagtcaaaaggaatttaatgtaattgaatggactcgaatggaatggaatcaagtggaatggaatggaatggacttgaatgaattgaatcgaatggaatggactcgaattaaatagaatggaatggaatatactcgaatggaatggacacgaatggaatggaatggagtggaatgcactggaatggaatggagtgcaatggaatggaatttacttcaatttaatagaagggaatggaatggaattgactcgaataaaatggaatggaatggactcgaatggaatggaatggacaagaatggaaaggaatgcaatggactcaaatggaatggaatggaatggaatggatgcgactggaatggaatgaaatggaatggactcgaatagaatagagtagactggatttgaatgaaatagaatggaattgaatggactcacgtcaaacagagtgttatgctatggaacggactcgaatctaatgtaatgtaatgaaatgaaagggattcgagtggaatggaatggactcgaatggaatacaatggaatggactgtatacgaatggactcaaatcgtatggaatggaaataaatggactttaaaagaatggaatggaatggaatagaatggaatggaatggactctaatggaatggaatggaatggaatggactccaaaggaaaacaacggactagaatggaatggaatggaatggaatggaaattactcgagtggaatggcatggaattgaatggactcaaatggaatggagtggactcgaatggaatggaaaggattggacccaattggaatggaatggaatggaatagaatcgtatggactcgaatggagtggaatgttatggaatggaatgggcttgaatggaatagaatggaatggaaaggaacggatttcaaatgaatagtatggaatggaaatgaatggaattgaatgaacatgaaaggaacggaatggaatggaatggactcgaatttaataaaatgcaacttaaaggtaaggatcctactggaatggaatggaatgcactcaaatggaatagaatggaatagactcgaatggaatggaagggaatggactcaaaatgaaaggaatggacactaatggaacagaatggaatggaatggaattgactcgaatggaaatgaatggaatggacacgagtggaatgcaatggaatggactcgaatggaatggaatggaatggacacaaatggaatggaatggactcgagtggaatggaacgtaatggagtgaaatggacttgaatggaatggaatggaatggaatggaatggaatggaatggaatggaatggaatgtagtggactcaaatggaatggaatgcaatggaatggactcgaaaggaatggaatggtattgagtggactcgaaagcaatggaatggaattgacttgaaatgaatggaatgcactcgaaagaaatggaatgaaatggactcgattgcaacggaatggactcgaattcaatggactttaatgatatggagtcgaatgaaatggactaaataggaatggaattgaatggaatggaatcgaatggaatgaaaacgaatgtaatgtgttcggatggaatggaatcgaatggaatggtatgcaatggaatgcaatcaaatggaatggaattgaatagaaaggaatcaaatggattggaattgaatgcaaaggaatcaaacgaaaaacactggaatggaaatgaatcgaatggaatggaaaggactagaacggtttcaaatgtaaaagagtcgaatggaatggaatcgaatggaatgaaatcaaaaggaatggacttgaatggaaaggaatgaaatggcatggaagggaattgagtcgaatggaatggaatggaatggaatggaatggaatggaagggaatgatattgaatcgagtggaatggaatggaatcacatggaatagaatgaaaagcaatggaaaggaatggaatcgacttgaatggaatgaaatcaaatggaatggaatcaaatggaatgcgatagaatagaatgtaatggaatggaatagaattgaatggaatggaatgaaatgcaatggaatcgaacggaatggattgtactccaatgtaaaggactggaatggaatggacttgaatggaatggactcgaatggaaaggattcgaacggaatgggcccgaatgcagtggattcaaatggaatggtcttgaaaggaatgctatagagtggaatagaatcaaatgcaatggaatataaatgaaatggactgtaattgaagggactcaaaaaaatggactagaaaagaatggactcgaatggaattgaacacaatggaatggaatggaatggcataaaatggaatatactcgaatgtataggagtggaattgaatggaataaaatggaatgtacttgaatgtataggagtggaatgtaatggatgtgaatggaatcaacccgaatggaaagctatcgaatccaatggaatggactggaatggaaagcaaaggaattgattggactcgaatggaatggactggaatgatatagactcaaaagtttttactcgaaaggaatggaatcaaaaggaatggaatccaatggaatggaaacttatgtaaggtattcgaatcgaatgaaatggaatcgaattgaaggggtacgaatggaatggaatggaatggaatggaatcgaatttaatggaattgaataggaaagaatcaaatggaatggaatcaacccgagtggaatggaatggaatggaaaggaatggaatggaatggaatggaatggaatggaatggaatggaatggaatggaatggaatggaatggaatggactccagtggaaaagactggaatggaacggtttcgaatgaaattgaatcgaatgaaatggaatggaatgcaatggaatcaaatggaatggacttgaatggaatggaatggaatggaatggaatggaatggaaaggaacagaatcaaattgaatcgaatggaatggaagggaatggaattgaatcacatggaattgaacggaatcaaatggaatatcatcaaatggaatgaaaaggaaagtaatggaatggaatagaaaggaatgaaatccaatgcaatggcatgaaatggaatggaatcaaatggaaagggaaagaatggaatgaaatggaatggaatggaatggaaaggaaaggaatcatatggattagattcgaaaggaattgaaaggaatggaatggaatggaatggaatggaatcgaatggatggaaattgaatggaatggcttcaaatggaatgggaaaaaatggaattggaaaaaatggaatggaacggaatggaatggaatgctatggaatggactcgaatgtaaaggactggaaaggaatggactcgaattgtaaagacacaaatggaatggaaactattggagtggaatcaaaaagactggaatcgaatggaaagggattgaatggaattgaatggaatggaaaggattggaatagaatggaatggaaaggaatggaatggaatggaatggaatggaatggaatggaatggaatgaaatggaatggaatggaatggaatggaatggaatggaatggaatagaatggaatgtgctcgaataaaaagactagaatgcaatggacttgaatggaatggactcgaatggaaaagatttaaaaggaattaacacaaatggaatggattcaaacgaaatgtctcgaaaggaatgctatcgtgtggaatggaatcaaataggatggaattcnnnnnnnnnnnnnnnnnnnnnnnnnnnnnnnnnnnnnnnnnnnnnnnnnnnnnnnnnnnnnnnnnnnnnnnnnnnnnnnnnnnnnnnnnnnnnnnnnnnnnnnnnnnnnnnnnnnnnnnnnnnnnnnnnnnnnnnnnnnnnnnnnnnnnnnnnnnnnnnnnnnnnnnnnnnnnnnnnnnnnnnnnnnnnnnnnnnnnnnnnnnnnnnnnnnnnnnnnnnnnnnnnnnnnnnnnnnnnnnnnnnnnnnnnnnnnnnnnnnnnnnnnnnnnnnnnnnnnnnnnnnnnnnnnnnnnnnnnnnnnnnnnnnnnnnnnnnnnnnnnnnnnnnnnnnnnnnnnnnnnnnnnnnnnnnnnnnnnnnnnnnnnnnnnnnnnnnnnnnnnnnnnnnnnnnnnnnnnnnnnnnnnnnnnnnnnnnnnnnnnnnnnnnnnnnnnnnnnnnnnnnnnnnnnnnnnnnnnnnnnnnnnnnnnnnnnnnnnnnnnnnnnnnnnnnnnnnnnnnnnnnnnnnnnnnnnnnnnnnnnnnnnnnnnnnnnnnnnnnnnnnnnnnnnnnnnnnnnnnnnnnnnnnnnnnnnnnnnnnnnnnnnnnnnnnnnnnnnnnnnnnnnnnnnnnnnnnnnnnnnnnnnnnnnnnnnnnnnnnnnnnnnnnnnnnnnnnnnnnnnnnnnnnnnnnnnnnnnnnnnnnnnnnnnnnnnnnnnnnnnnnnnnnnnnnnnnnnnnnnnnnnnnnnnnnnnnnnnnnnnnnnnnnnnnnnnnnnnnnnnnnnnnnnnnnnnnnnnnnnnnnnnnnnnnnnnnnnnnnnnnnnnnnnnnnnnnnnnnnnnnnnnnnnnnnnnnnnnnnnnnnnnnnnnnnnnnnnnnnnnnnnnnnnnnnnnnnnnnnnnnnnnnnnnnnnnnnnnnnnnnnnnnnnnnnnnnnnnnnnnnnnnnnnnnnnnnnnnnnnnnnnnnnnnnnnnnnnnnnnnnnnnnnnnnnnnnnnnnnnnnnnnnnnnnnnnnnnnnnnnnnnnnnnnnnnnnnnnnnnnnnnnnnnnnnnnnnnnnnnnnnnnnnnnnnnnnnnnnnnnnnnnnnnnnnnnnnnnnnnnnnnnnnnnnnnnnnnnnnnnnnnnnnnnnnnnnnnnnnnnnnnnnnnnnnnnnnnnnnnnnnnnnnnnnnnnnnnnnnnnnnnnnnnnnnnnnnnnnnnnnnnnnnnnnnnnnnnnnnnnnnnnnnnnnnnnnnnnnnnnnnnnnnnnnnnnnnnnnnnnnnnnnnnnnnnnnnnnnnnnnnnnnnnnnnnnnnnnnnnnnnnnnnnnnnnnnnnnnnnnnnnnnnnnnnnnnnnnnnnnnnnnnnnnnnnnnnnnnnnnnnnnnnnnnnnnnnnnnnnnnnnnnnnnnnnnnnnnnnnnnnnnnnnnnnnnnnnnnnnnnnnnnnnnnnnnnnnnnnnnnnnnnnnnnnnnnnnnnnnnnnnnnnnnnnnnnnnnnnnnnnnnnnnnnnnnnnnnnnnnnnnnnnnnnnnnnnnnnnnnnnnnnnnnnnnnnnnnnnnnnnnnnnnnnnnnnnnnnnnnnnnnnnnnnnnnnnnnnnnnnnnnnnnnnnnnnnnnnnnnnnnnnnnnnnnnnnnnnnnnnnnnnnnnnnnnnnnnnnnnnnnnnnnnnnnnnnnnnnnnnnnnnnnnnnnnnnnnnnnnnnnnnnnnnnnnnnnnnnnnnnnnnnnnnnnnnnnnnnnnnnnnnnnnnnnnnnnnnnnnnnnnnnnnnnnnnnnnnnnnnnnnnnnnnnnnnnnnnnnnnnnnnnnnnnnnnnnnnnnnnnnnnnnnnnnnnnnnnnnnnnnnnnnnnnnnnnnnnnnnnnnnnnnnnnnnnnnnnnnnnnnnnnnnnnnnnnnnnnnnnnnnnnnnnnnnnnnnnnnnnnnnnnnnnnnnnnnnnnnnnnnnnnnnnnnnnnnnnnnnnnnnnnnnnnnnnnnnnnnnnnnnnnnnnnnnnnnnnnnnnnnnnnnnnnnnnnnnnnnnnnnnnnnnnnnnnnnnnnnnnnnnnnnnnnnnnnnnnnnnnnnnnnnnnnnnnnnnnnnnnnnnnnnnnnnnnnnnnnnnnnnnnnnnnnnnnnnnnnnnnnnnnnnnnnnnnnnnnnnnnnnnnnnnnnnnnnnnnnnnnnnnnnnnnnnnnnnnnnnnnnnnnnnnnnnnnnnnnnnnnnnnnnnnnnnnnnnnnnnnnnnnnnnnnnnnnnnnnnnnnnnnnnnnnnnnnnnnnnnnnnnnnnnnnnnnnnnnnnnnnnnnnnnnnnnnnnnnnnnnnnnnnnnnnnnnnnnnnnnnnnnnnnnnnnnnnnnnnnnnnnnnnnnnnnnnnnnnnnnnnnnnnnnnnnnnnnnnnnnnnnnnnnnnnnnnnnnnnnnnnnnnnnnnnnnnnnnnnnnnnnnnnnnnnnnnnnnnnnnnnnnnnnnnnnnnnnnnnnnnnnnnnnnnnnnnnnnnnnnnnnnnnnnnnnnnnnnnnnnnnnnnnnnnnnnnnnnnnnnnnnnnnnnnnnnnnnnnnnnnnnnnnnnnnnnnnnnnnnnnnnnnnnnnnnnnnnnnnnnnnnnnnnnnnnnnnnnnnnnnnnnnnnnnnnnnnnnnnnnnnnnnnnnnnnnnnnnnnnnnnnnnnnnnnnnnnnnnnnnnnnnnnnnnnnnnnnnnnnnnnnnnnnnnnnnnnnnnnnnnnnnnnnnnnnnnnnnnnnnnnnnnnnnnnnnnnnnnnnnnnnnnnnnnnnnnnnnnnnnnnnnnnnnnnnnnnnnnnnnnnnnnnnnnnnnnnnnnnnnnnnnnnnnnnnnnnnnnnnnnnnnnnnnnnnnnnnnnnnnnnnnnnnnnnnnnnnnnnnnnnnnnnnnnnnnnnnnnnnnnnnnnnnnnnnnnnnnnnnnnnnnnnnnnnnnnnnnnnnnnnnnnnnnnnnnnnnnnnnnnnnnnnnnnnnnnnnnnnnnnnnnnnnnnnnnnnnnnnnnnnnnnnnnnnnnnnnnnnnnnnnnnnnnnnnnnnnnnnnnnnnnnnnnnnnnnnnnnnnnnnnnnnnnnnnnnnnnnnnnnnnnnnnnnnnnnnnnnnnnnnnnnnnnnnnnnnnnnnnnnnnnnnnnnnnnnnnnnnnnnnnnnnnnnnnnnnnnnnnnnnnnnnnnnnnnnnnnnnnnnnnnnnnnnnnnnnnnnnnnnnnnnnnnnnnnnnnnnnnnnnnnnnnnnnnnnnnnnnnnnnnnnnnnnnnnnnnnnnnnnnnnnnnnnnnnnnnnnnnnnnnnnnnnnnnnnnnnnnnnnnnnnnnnnnnnnnnnnnnnnnnnnnnnnnnnnnnnnnnnnnnnnnnnnnnnnnnnnnnnnnnnnnnnnnnnnnnnnnnnnnnnnnnnnnnnnnnnnnnnnnnnnnnnnnnnnnnnnnnnnnnnnnnnnnnnnnnnnnnnnnnnnnnnnnnnnnnnnnnnnnnnnnnnnnnnnnnnnnnnnnnnnnnnnnnnnnnnnnnnnnnnnnnnnnnnnnnnnnnnnnnnnnnnnnnnnnnnnnnnnnnnnnnnnnnnnnnnnnnnnnnnnnnnnnnnnnnnnnnnnnnnnnnnnnnnnnnnnnnnnnnnnnnnnnnnnnnnnnnnnnnnnnnnnnnnnnnnnnnnnnnnnnnnnnnnnnnnnnnnnnnnnnnnnnnnnnnnnnnnnnnnnnnnnnnnnnnnnnnnnnnnnnnnnnnnnnnnnnnnnnnnnnnnnnnnnnnnnnnnnnnnnnnnnnnnnnnnnnnnnnnnnnnnnnnnnnnnnnnnnnnnnnnnnnnnnnnnnnnnnnnnnnnnnnnnnnnnnnnnnnnnnnnnnnnnnnnnnnnnnnnnnnnnnnnnnnnnnnnnnnnnnnnnnnnnnnnnnnnnnnnnnnnnnnnnnnnnnnnnnnnnnnnnnnnnnnnnnnnnnnnnnnnnnnnnnnnnnnnnnnnnnnnnnnnnnnnnnnnnnnnnnnnnnnnnnnnnnnnnnnnnnnnnnnnnnnnnnnnnnnnnnnnnnnnnnnnnnnnnnnnnnnnnnnnnnnnnnnnnnnnnnnnnnnnnnnnnnnnnnnnnnnnnnnnnnnnnnnnnnnnnnnnnnnnnnnnnnnnnnnnnnnnnnnnnnnnnnnnnnnnnnnnnnnnnnnnnnnnnnnnnnnnnnnnnnnnnnnnnnnnnnnnnnnnnnnnnnnnnnnnnnnnnnnnnnnnnnnnnnnnnnnnnnnnnnnnnnnnnnnnnnnnnnnnnnnnnnnnnnnnnnnnnnnnnnnnnnnnnnnnnnnnnnnnnnnnnnnnnnnnnnnnnnnnnnnnnnnnnnnnnnnnnnnnnnnnnnnnnnnnnnnnnnnnnnnnnnnnnnnnnnnnnnnnnnnnnnnnnnnnnnnnnnnnnnnnnnnnnnnnnnnnnnnnnnnnnnnnnnnnnnnnnnnnnnnnnnnnnnnnnnnnnnnnnnnnnnnnnnnnnnnnnnnnnnnnnnnnnnnnnnnnnnnnnnnnnnnnnnnnnnnnnnnnnnnnnnnnnnnnnnnnnnnnnnnnnnnnnnnnnnnnnnnnnnnnnnnnnnnnnnnnnnnnnnnnnnnnnnnnnnnnnnnnnnnnnnnnnnnnnnnnnnnnnnnnnnnnnnnnnnnnnnnnnnnnnnnnnnnnnnnnnnnnnnnnnnnnnnnnnnnnnnnnnnnnnnnnnnnnnnnnnnnnnnnnnnnnnnnnnnnnnnnnnnnnnnnnnnnnnnnnnnnnnnnnnnnnnnnnnnnnnnnnnnnnnnnnnnnnnnnnnnnnnnnnnnnnnnnnnnnnnnnnnnnnnnnnnnnnnnnnnnnnnnnnnnnnnnnnnnnnnnnnnnnnnnnnnnnnnnnnnnnnnnnnnnnnnnnnnnnnnnnnnnnnnnnnnnnnnnnnnnnnnnnnnnnnnnnnnnnnnnnnnnnnnnnnnnnnnnnnnnnnnnnnnnnnnnnnnnnnnnnnnnnnnnnnnnnnnnnnnnnnnnnnnnnnnnnnnnnnnnnnnnnnnnnnnnnnnnnnnnnnnnnnnnnnnnnnnnnnnnnnnnnnnnnnnnnnnnnnnnnnnnnnnnnnnnnnnnnnnnnnnnnnnnnnnnnnnnnnnnnnnnnnnnnnnnnnnnnnnnnnnnnnnnnnnnnnnnnnnnnnnnnnnnnnnnnnnnnnnnnnnnnnnnnnnnnnnnnnnnnnnnnnnnnnnnnnnnnnnnnnnnnnnnnnnnnnnnnnnnnnnnnnnnnnnnnnnnnnnnnnnnnnnnnnnnnnnnnnnnnnnnnnnnnnnnnnnnnnnnnnnnnnnnnnnnnnnnnnnnnnnnnnnnnnnnnnnnnnnnnnnnnnnnnnnnnnnnnnnnnnnnnnnnnnnnnnnnnnnnnnnnnnnnnnnnnnnnnnnnnnnnnnnnnnnnnnnnnnnnnnnnnnnnnnnnnnnnnnnnnnnnnnnnnnnnnnnnnnnnnnnnnnnnnnnnnnnnnnnnnnnnnnnnnnnnnnnnnnnnnnnnnnnnnnnnnnnnnnnnnnnnnnnnnnnnnnnnnnnnnnnnnnnnnnnnnnnnnnnnnnnnnnnnnnnnnnnnnnnnnnnnnnnnnnnnnnnnnnnnnnnnnnnnnnnnnnnnnnnnnnnnnnnnnnnnnnnnnnnnnnnnnnnnnnnnnnnnnnnnnnnnnnnnnnnnnnnnnnnnnnnnnnnnnnnnnnnnnnnnnnnnnnnnnnnnnnnnnnnnnnnnnnnnnnnnnnnnnnnnnnnnnnnnnnnnnnnnnnnnnnnnnnnnnnnnnnnnnnnnnnnnnnnnnnnnnnnnnnnnnnnnnnnnnnnnnnnnnnnnnnnnnnnnnnnnnnnnnnnnnnnnnnnnnnnnnnnnnnnnnnnnnnnnnnnnnnnnnnnnnnnnnnnnnnnnnnnnnnnnnnnnnnnnnnnnnnnnnnnnnnnnnnnnnnnnnnnnnnnnnnnnnnnnnnnnnnnnnnnnnnnnnnnnnnnnnnnnnnnnnnnnnnnnnnnnnnnnnnnnnnnnnnnnnnnnnnnnnnnnnnnnnnnnnnnnnnnnnnnnnnnnnnnnnnnnnnnnnnnnnnnnnnnnnnnnnnnnnnnnnnnnnnnnnnnnnnnnnnnnnnnnnnnnnnnnnnnnnnnnnnnnnnnnnnnnnnnnnnnnnnnnnnnnnnnnnnnnnnnnnnnnnnnnnnnnnnnnnnnnnnnnnnnnnnnnnnnnnnnnnnnnnnnnnnnnnnnnnnnnnnnnnnnnnnnnnnnnnnnnnnnnnnnnnnnnnnnnnnnnnnnnnnnnnnnnnnnnnnnnnnnnnnnnnnnnnnnnnnnnnnnnnnnnnnnnnnnnnnnnnnnnnnnnnnnnnnnnnnnnnnnnnnnnnnnnnnnnnnnnnnnnnnnnnnnnnnnnnnnnnnnnnnnnnnnnnnnnnnnnnnnnnnnnnnnnnnnnnnnnnnnnnnnnnnnnnnnnnnnnnnnnnnnnnnnnnnnnnnnnnnnnnnnnnnnnnnnnnnnnnnnnnnnnnnnnnnnnnnnnnnnnnnnnnnnnnnnnnnnnnnnnnnnnnnnnnnnnnnnnnnnnnnnnnnnnnnnnnnnnnnnnnnnnnnnnnnnnnnnnnnnnnnnnnnnnnnnnnnnnnnnnnnnnnnnnnnnnnnnnnnnnnnnnnnnnnnnnnnnnnnnnnnnnnnnnnnnnnnnnnnnnnnnnnnnnnnnnnnnnnnnnnnnnnnnnnnnnnnnnnnnnnnnnnnnnnnnnnnnnnnnnnnnnnnnnnnnnnnnnnnnnnnnnnnnnnnnnnnnnnnnnnnnnnnnnnnnnnnnnnnnnnnnnnnnnnnnnnnnnnnnnnnnnnnnnnnnnnnnnnnnnnnnnnnnnnnnnnnnnnnnnnnnnnnnnnnnnnnnnnnnnnnnnnnnnnnnnnnnnnnnnnnnnnnnnnnnnnnnnnnnnnnnnnnnnnnnnnnnnnnnnnnnnnnnnnnnnnnnnnnnnnnnnnnnnnnnnnnnnnnnnnnnnnnnnnnnnnnnnnnnnnnnnnnnnnnnnnnnnnnnnnnnnnnnnnnnnnnnnnnnnnnnnnnnnnnnnnnnnnnnnnnnnnnnnnnnnnnnnnnnnnnnnnnnnnnnnnnnnnnnnnnnnnnnnnnnnnnnnnnnnnnnnnnnnnnnnnnnnnnnnnnnnnnnnnnnnnnnnnnnnnnnnnnnnnnnnnnnnnnnnnnnnnnnnnnnnnnnnnnnnnnnnnnnnnnnnnnnnnnnnnnnnnnnnnnnnnnnnnnnnnnnnnnnnnnnnnnnnnnnnnnnnnnnnnnnnnnnnnnnnnnnnnnnnnnnnnnnnnnnnnnnnnnnnnnnnnnnnnnnnnnnnnnnnnnnnnnnnnnnnnnnnnnnnnnnnnnnnnnnnnnnnnnnnnnnnnnnnnnnnnnnnnnnnnnnnnnnnnnnnnnnnnnnnnnnnnnnnnnnnnnnnnnnnnnnnnnnnnnnnnnnnnnnnnnnnnnnnnnnnnnnnnnnnnnnnnnnnnnnnnnnnnnnnnnnnnnnnnnnnnnnnnnnnnnnnnnnnnnnnnnnnnnnnnnnnnnnnnnnnnnnnnnnnnnnnnnnnnnnnnnnnnnnnnnnnnnnnnnnnnnnnnnnnnnnnnnnnnnnnnnnnnnnnnnnnnnnnnnnnnnnnnnnnnnnnnnnnnnnnnnnnnnnnnnnnnnnnnnnnnnnnnnnnnnnnnnnnnnnnnnnnnnnnnnnnnnnnnnnnnnnnnnnnnnnnnnnnnnnnnnnnnnnnnnnnnnnnnnnnnnnnnnnnnnnnnnnnnnnnnnnnnnnnnnnnnnnnnnnnnnnnnnnnnnnnnnnnnnnnnnnnnnnnnnnnnnnnnnnnnnnnnnnnnnnnnnnnnnnnnnnnnnnnnnnnnnnnnnnnnnnnnnnnnnnnnnnnnnnnnnnnnnnnnnnnnnnnnnnnnnnnnnnnnnnnnnnnnnnnnnnnnnnnnnnnnnnnnnnnnnnnnnnnnnnnnnnnnnnnnnnnnnnnnnnnnnnnnnnnnnnnnnnnnnnnnnnnnnnnnnnnnnnnnnnnnnnnnnnnnnnnnnnnnnnnnnnnnnnnnnnnnnnnnnnnnnnnnnnnnnnnnnnnnnnnnnnnnnnnnnnnnnnnnnnnnnnnnnnnnnnnnnnnnnnnnnnnnnnnnnnnnnnnnnnnnnnnnnnnnnnnnnnnnnnnnnnnnnnnnnnnnnnnnnnnnnnnnnnnnnnnnnnnnnnnnnnnnnnnnnnnnnnnnnnnnnnnnnnnnnnnnnnnnnnnnnnnnnnnnnnnnnnnnnnnnnnnnnnnnnnnnnnnnnnnnnnnnnnnnnnnnnnnnnnnnnnnnnnnnnnnnnnnnnnnnnnnnnnnnnnnnnnnnnnnnnnnnnnnnnnnnnnnnnnnnnnnnnnnnnnnnnnnnnnnnnnnnnnnnnnnnnnnnnnnnnnnnnnnnnnnnnnnnnnnnnnnnnnnnnnnnnnnnnnnnnnnnnnnnnnnnnnnnnnnnnnnnnnnnnnnnnnnnnnnnnnnnnnnnnnnnnnnnnnnnnnnnnnnnnnnnnnnnnnnnnnnnnnnnnnnnnnnnnnnnnnnnnnnnnnnnnnnnnnnnnnnnnnnnnnnnnnnnnnnnnnnnnnnnnnnnnnnnnnnnnnnnnnnnnnnnnnnnnnnnnnnnnnnnnnnnnnnnnnnnnnnnnnnnnnnnnnnnnnnnnnnnnnnnnnnnnnnnnnnnnnnnnnnnnnnnnnnnnnnnnnnnnnnnnnnnnnnnnnnnnnnnnnnnnnnnnnnnnnnnnnnnnnnnnnnnnnnnnnnnnnnnnnnnnnnnnnnnnnnnnnnnnnnnnnnnnnnnnnnnnnnnnnnnnnnnnnnnnnnnnnnnnnnnnnnnnnnnnnnnnnnnnnnnnnnnnnnnnnnnnnnnnnnnnnnnnnnnnnnnnnnnnnnnnnnnnnnnnnnnnnnnnnnnnnnnnnnnnnnnnnnnnnnnnnnnnnnnnnnnnnnnnnnnnnnnnnnnnnnnnnnnnnnnnnnnnnnnnnnnnnnnnnnnnnnnnnnnnnnnnnnnnnnnnnnnnnnnnnnnnnnnnnnnnnnnnnnnnnnnnnnnnnnnnnnnnnnnnnnnnnnnnnnnnnnnnnnnnnnnnnnnnnnnnnnnnnnnnnnnnnnnnnnnnnnnnnnnnnnnnnnnnnnnnnnnnnnnnnnnnnnnnnnnnnnnnnnnnnnnnnnnnnnnnnnnnnnnnnnnnnnnnnnnnnnnnnnnnnnnnnnnnnnnnnnnnnnnnnnnnnnnnnnnnnnnnnnnnnnnnnnnnnnnnnnnnnnnnnnnnnnnnnnnnnnnnnnnnnnnnnnnnnnnnnnnnnnnnnnnnnnnnnnnnnnnnnnnnnnnnnnnnnnnnnnnnnnnnnnnnnnnnnnnnnnnnnnnnnnnnnnnnnnnnnnnnnnnnnnnnnnnnnnnnnnnnnnnnnnnnnnnnnnnnnnnnnnnnnnnnnnnnnnnnnnnnnnnnnnnnnnnnnnnnnnnnnnnnnnnnnnnnnnnnnnnnnnnnnnnnnnnnnnnnnnnnnnnnnnnnnnnnnnnnnnnnnnnnnnnnnnnnnnnnnnnnnnnnnnnnnnnnnnnnnnnnnnnnnnnnnnnnnnnnnnnnnnnnnnnnnnnnnnnnnnnnnnnnnnnnnnnnnnnnnnnnnnnnnnnnnnnnnnnnnnnnnnnnnnnnnnnnnnnnnnnnnnnnnnnnnnnnnnnnnnnnnnnnnnnnnnnnnnnnnnnnnnnnnnnnnnnnnnnnnnnnnnnnnnnnnnnnnnnnnnnnnnnnnnnnnnnnnnnnnnnnnnnnnnnnnnnnnnnnnnnnnnnnnnnnnnnnnnnnnnnnnnnnnnnnnnnnnnnnnnnnnnnnnnnnnnnnnnnnnnnnnnnnnnnnnnnnnnnnnnnnnnnnnnnnnnnnnnnnnnnnnnnnnnnnnnnnnnnnnnnnnnnnnnnnnnnnnnnnnnnnnnnnnnnnnnnnnnnnnnnnnnnnnnnnnnnnnnnnnnnnnnnnnnnnnnnnnnnnnnnnnnnnnnnnnnnnnnnnnnnnnnnnnnnnnnnnnnnnnnnnnnnnnnnnnnnnnnnnnnnnnnnnnnnnnnnnnnnnnnnnnnnnnnnnnnnnnnnnnnnnnnnnnnnnnnnnnnnnnnnnnnnnnnnnnnnnnnnnnnnnnnnnnnnnnnnnnnnnnnnnnnnnnnnnnnnnnnnnnnnnnnnnnnnnnnnnnnnnnnnnnnnnnnnnnnnnnnnnnnnnnnnnnnnnnnnnnnnnnnnnnnnnnnnnnnnnnnnnnnnnnnnnnnnnnnnnnnnnnnnnnnnnnnnnnnnnnnnnnnnnnnnnnnnnnnnnnnnnnnnnnnnnnnnnnnnnnnnnnnnnnnnnnnnnnnnnnnnnnnnnnnnnnnnnnnnnnnnnnnnnnnnnnnnnnnnnnnnnnnnnnnnnnnnnnnnnnnnnnnnnnnnnnnnnnnnnnnnnnnnnnnnnnnnnnnnnnnnnnnnnnnnnnnnnnnnnnnnnnnnnnnnnnnnnnnnnnnnnnnnnnnnnnnnnnnnnnnnnnnnnnnnnnnnnnnnnnnnnnnnnnnnnnnnnnnnnnnnnnnnnnnnnnnnnnnnnnnnnnnnnnnnnnnnnnnnnnnnnnnnnnnnnnnnnnnnnnnnnnnnnnnnnnnnnnnnnnnnnnnnnnnnnnnnnnnnnnnnnnnnnnnnnnnnnnnnnnnnnnnnnnnnnnnnnnnnnnnnnnnnnnnnnnnnnnnnnnnnnnnnnnnnnnnnnnnnnnnnnnnnnnnnnnnnnnnnnnnnnnnnnnnnnnnnnnnnnnnnnnnnnnnnnnnnnnnnnnnnnnnnnnnnnnnnnnnnnnnnnnnnnnnnnnnnnnnnnnnnnnnnnnnnnnnnnnnnnnnnnnnnnnnnnnnnnnnnnnnnnnnnnnnnnnnnnnnnnnnnnnnnnnnnnnnnnnnnnnnnnnnnnnnnnnnnnnnnnnnnnnnnnnnnnnnnnnnnnnnnnnnnnnnnnnnnnnnnnnnnnnnnnnnnnnnnnnnnnnnnnnnnnnnnnnnnnnnnnnnnnnnnnnnnnnnnnnnnnnnnnnnnnnnnnnnnnnnnnnnnnnnnnnnnnnnnnnnnnnnnnnnnnnnnnnnnnnnnnnnnnnnnnnnnnnnnnnnnnnnnnnnnnnnnnnnnnnnnnnnnnnnnnnnnnnnnnnnnnnnnnnnnnnnnnnnnnnnnnnnnnnnnnnnnnnnnnnnnnnnnnnnnnnnnnnnnnnnnnnnnnnnnnnnnnnnnnnnnnnnnnnnnnnnnnnnnnnnnnnnnnnnnnnnnnnnnnnnnnnnnnnnnnnnnnnnnnnnnnnnnnnnnnnnnnnnnnnnnnnnnnnnnnnnnnnnnnnnnnnnnnnnnnnnnnnnnnnnnnnnnnnnnnnnnnnnnnnnnnnnnnnnnnnnnnnnnnnnnnnnnnnnnnnnnnnnnnnnnnnnnnnnnnnnnnnnnnnnnnnnnnnnnnnnnnnnnnnnnnnnnnnnnnnnnnnnnnnnnnnnnnnnnnnnnnnnnnnnnnnnnnnnnnnnnnnnnnnnnnnnnnnnnnnnnnnnnnnnnnnnnnnnnnnnnnnnnnnnnnnnnnnnnnnnnnnnnnnnnnnnnnnnnnnnnnnnnnnnnnnnnnnnnnnnnnnnnnnnnnnnnnnnnnnnnnnnnnnnnnnnnnnnnnnnnnnnnnnnnnnnnnnnnnnnnnnnnnnnnnnnnnnnnnnnnnnnnnnnnnnnnnnnnnnnnnnnnnnnnnnnnnnnnnnnnnnnnnnnnnnnnnnnnnnnnnnnnnnnnnnnnnnnnnnnnnnnnnnnnnnnnnnnnnnnnnnnnnnnnnnnnnnnnnnnnnnnnnnnnnnnnnnnnnnnnnnnnnnnnnnnnnnnnnnnnnnnnnnnnnnnnnnnnnnnnnnnnnnnnnnnnnnnnnnnnnnnnnnnnnnnnnnnnnnnnnnnnnnnnnnnnnnnnnnnnnnnnnnnnnnnnnnnnnnnnnnnnnnnnnnnnnnnnnnnnnnnnnnnnnnnnnnnnnnnnnnnnnnnnnnnnnnnnnnnnnnnnnnnnnnnnnnnnnnnnnnnnnnnnnnnnnnnnnnnnnnnnnnnnnnnnnnnnnnnnnnnnnnnnnnnnnnnnnnnnnnnnnnnnnnnnnnnnnnnnnnnnnnnnnnnnnnnnnnnnnnnnnnnnnnnnnnnnnnnnnnnnnnnnnnnnnnnnnnnnnnnnnnnnnnnnnnnnnnnnnnnnnnnnnnnnnnnnnnnnnnnnnnnnnnnnnnnnnnnnnnnnnnnnnnnnnnnnnnnnnnnnnnnnnnnnnnnnnnnnnnnnnnnnnnnnnnnnnnnnnnnnnnnnnnnnnnnnnnnnnnnnnnnnnnnnnnnnnnnnnnnnnnnnnnnnnnnnnnnnnnnnnnnnnnnnnnnnnnnnnnnnnnnnnnnnnnnnnnnnnnnnnnnnnnnnnnnnnnnnnnnnnnnnnnnnnnnnnnnnnnnnnnnnnnnnnnnnnnnnnnnnnnnnnnnnnnnnnnnnnnnnnnnnnnnnnnnnnnnnnnnnnnnnnnnnnnnnnnnnnnnnnnnnnnnnnnnnnnnnnnnnnnnnnnnnnnnnnnnnnnnnnnnnnnnnnnnnnnnnnnnnnnnnnnnnnnnnnnnnnnnnnnnnnnnnnnnnnnnnnnnnnnnnnnnnnnnnnnnnnnnnnnnnnnnnnnnnnnnnnnnnnnnnnnnnnnnnnnnnnnnnnnnnnnnnnnnnnnnnnnnnnnnnnnnnnnnnnnnnnnnnnnnnnnnnnnnnnnnnnnnnnnnnnnnnnnnnnnnnnnnnnnnnnnnnnnnnnnnnnnnnnnnnnnnnnnnnnnnnnnnnnnnnnnnnnnnnnnnnnnnnnnnnnnnnnnnnnnnnnnnnnnnnnnnnnnnnnnnnnnnnnnnnnnnnnnnnnnnnnnnnnnnnnnnnnnnnnnnnnnnnnnnnnnnnnnnnnnnnnnnnnnnnnnnnnnnnnnnnnnnnnnnnnnnnnnnnnnnnnnnnnnnnnnnnnnnnnnnnnnnnnnnnnnnnnnnnnnnnnnnnnnnnnnnnnnnnnnnnnnnnnnnnnnnnnnnnnnnnnnnnnnnnnnnnnnnnnnnnnnnnnnnnnnnnnnnnnnnnnnnnnnnnnnnnnnnnnnnnnnnnnnnnnnnnnnnnnnnnnnnnnnnnnnnnnnnnnnnnnnnnnnnnnnnnnnnnnnnnnnnnnnnnnnnnnnnnnnnnnnnnnnnnnnnnnnnnnnnnnnnnnnnnnnnnnnnnnnnnnnnnnnnnnnnnnnnnnnnnnnnnnnnnnnnnnnnnnnnnnnnnnnnnnnnnnnnnnnnnnnnnnnnnnnnnnnnnnnnnnnnnnnnnnnnnnnnnnnnnnnnnnnnnnnnnnnnnnnnnnnnnnnnnnnnnnnnnnnnnnnnnnnnnnnnnnnnnnnnnnnnnnnnnnnnnnnnnnnnnnnnnnnnnnnnnnnnnnnnnnnnnnnnnnnnnnnnnnnnnnnnnnnnnnnnnnnnnnnnnnnnnnnnnnnnnnnnnnnnnnnnnnnnnnnnnnnnnnnnnnnnnnnnnnnnnnnnnnnnnnnnnnnnnnnnnnnnnnnnnnnnnnnnnnnnnnnnnnnnnnnnnnnnnnnnnnnnnnnnnnnnnnnnnnnnnnnnnnnnnnnnnnnnnnnnnnnnnnnnnnnnnnnnnnnnnnnnnnnnnnnnnnnnnnnnnnnnnnnnnnnnnnnnnnnnnnnnnnnnnnnnnnnnnnnnnnnnnnnnnnnnnnnnnnnnnnnnnnnnnnnnnnnnnnnnnnnnnnnnnnnnnnnnnnnnnnnnnnnnnnnnnnnnnnnnnnnnnnnnnnnnnnnnnnnnnnnnnnnnnnnnnnnnnnnnnnnnnnnnnnnnnnnnnnnnnnnnnnnnnnnnnnnnnnnnnnnnnnnnnnnnnnnnnnnnnnnnnnnnnnnnnnnnnnnnnnnnnnnnnnnnnnnnnnnnnnnnnnnnnnnnnnnnnnnnnnnnnnnnnnnnnnnnnnnnnnnnnnnnnnnnnnnnnnnnnnnnnnnnnnnnnnnnnnnnnnnnnnnnnnnnnnnnnnnnnnnnnnnnnnnnnnnnnnnnnnnnnnnnnnnnnnnnnnnnnnnnnnnnnnnnnnnnnnnnnnnnnnnnnnnnnnnnnnnnnnnnnnnnnnnnnnnnnnnnnnnnnnnnnnnnnnnnnnnnnnnnnnnnnnnnnnnnnnnnnnnnnnnnnnnnnnnnnnnnnnnnnnnnnnnnnnnnnnnnnnnnnnnnnnnnnnnnnnnnnnnnnnnnnnnnnnnnnnnnnnnnnnnnnnnnnnnnnnnnnnnnnnnnnnnnnnnnnnnnnnnnnnnnnnnnnnnnnnnnnnnnnnnnnnnnnnnnnnnnnnnnnnnnnnnnnnnnnnnnnnnnnnnnnnnnnnnnnnnnnnnnnnnnnnnnnnnnnnnnnnnnnnnnnnnnnnnnnnnnnnnnnnnnnnnnnnnnnnnnnnnnnnnnnnnnnnnnnnnnnnnnnnnnnnnnnnnnnnnnnnnnnnnnnnnnnnnnnnnnnnnnnnnnnnnnnnnnnnnnnnnnnnnnnnnnnnnnnnnnnnnnnnnnnnnnnnnnnnnnnnnnnnnnnnnnnnnnnnnnnnnnnnnnnnnnnnnnnnnnnnnnnnnnnnnnnnnnnnnnnnnnnnnnnnnnnnnnnnnnnnnnnnnnnnnnnnnnnnnnnnnnnnnnnnnnnnnnnnnnnnnnnnnnnnnnnnnnnnnnnnnnnnnnnnnnnnnnnnnnnnnnnnnnnnnnnnnnnnnnnnnnnnnnnnnnnnnnnnnnnnnnnnnnnnnnnnnnnnnnnnnnnnnnnnnnnnnnnnnnnnnnnnnnnnnnnnnnnnnnnnnnnnnnnnnnnnnnnnnnnnnnnnnnnnnnnnnnnnnnnnnnnnnnnnnnnnnnnnnnnnnnnnnnnnnnnnnnnnnnnnnnnnnnnnnnnnnnnnnnnnnnnnnnnnnnnnnnnnnnnnnnnnnnnnnnnnnnnnnnnnnnnnnnnnnnnnnnnnnnnnnnnnnnnnnnnnnnnnnnnnnnnnnnnnnnnnnnnnnnnnnnnnnnnnnnnnnnnnnnnnnnnnnnnnnnnnnnnnnnnnnnnnnnnnnnnnnnnnnnnnnnnnnnnnnnnnnnnnnnnnnnnnnnnnnnnnnnnnnnnnnnnnnnnnnnnnnnnnnnnnnnnnnnnnnnnnnnnnnnnnnnnnnnnnnnnnnnnnnnnnnnnnnnnnnnnnnnnnnnnnnnnnnnnnnnnnnnnnnnnnnnnnnnnnnnnnnnnnnnnnnnnnnnnnnnnnnnnnnnnnnnnnnnnnnnnnnnnnnnnnnnnnnnnnnnnnnnnnnnnnnnnnnnnnnnnnnnnnnnnnnnnnnnnnnnnnnnnnnnnnnnnnnnnnnnnnnnnnnnnnnnnnnnnnnnnnnnnnnnnnnnnnnnnnnnnnnnnnnnnnnnnnnnnnnnnnnnnnnnnnnnnnnnnnnnnnnnnnnnnnnnnnnnnnnnnnnnnnnnnnnnnnnnnnnnnnnnnnnnnnnnnnnnnnnnnnnnnnnnnnnnnnnnnnnnnnnnnnnnnnnnnnnnnnnnnnnnnnnnnnnnnnnnnnnnnnnnnnnnnnnnnnnnnnnnnnnnnnnnnnnnnnnnnnnnnnnnnnnnnnnnnnnnnnnnnnnnnnnnnnnnnnnnnnnnnnnnnnnnnnnnnnnnnnnnnnnnnnnnnnnnnnnnnnnnnnnnnnnnnnnnnnnnnnnnnnnnnnnnnnnnnnnnnnnnnnnnnnnnnnnnnnnnnnnnnnnnnnnnnnnnnnnnnnnnnnnnnnnnnnnnnnnnnnnnnnnnnnnnnnnnnnnnnnnnnnnnnnnnnnnnnnnnnnnnnnnnnnnnnnnnnnnnnnnnnnnnnnnnnnnnnnnnnnnnnnnnnnnnnnnnnnnnnnnnnnnnnnnnnnnnnnnnnnnnnnnnnnnnnnnnnnnnnnnnnnnnnnnnnnnnnnnnnnnnnnnnnnnnnnnnnnnnnnnnnnnnnnnnnnnnnnnnnnnnnnnnnnnnnnnnnnnnnnnnnnnnnnnnnnnnnnnnnnnnnnnnnnnnnnnnnnnnnnnnnnnnnnnnnnnnnnnnnnnnnnnnnnnnnnnnnnnnnnnnnnnnnnnnnnnnnnnnnnnnnnnnnnnnnnnnnnnnnnnnnnnnnnnnnnnnnnnnnnnnnnnnnnnnnnnnnnnnnnnnnnnnnnnnnnnnnnnnnnnnnnnnnnnnnnnnnnnnnnnnnnnnnnnnnnnnnnnnnnnnnnnnnnnnnnnnnnnnnnnnnnnnnnnnnnnnnnnnnnnnnnnnnnnnnnnnnnnnnnnnnnnnnnnnnnnnnnnnnnnnnnnnnnnnnnnnnnnnnnnnnnnnnnnnnnnnnnnnnnnnnnnnnnnnnnnnnnnnnnnnnnnnnnnnnnnnnnnnnnnnnnnnnnnnnnnnnnnnnnnnnnnnnnnnnnnnnnnnnnnnnnnnnnnnnnnnnnnnnnnnnnnnnnnnnnnnnnnnnnnnnnnnnnnnnnnnnnnnnnnnnnnnnnnnnnnnnnnnnnnnnnnnnnnnnnnnnnnnnnnnnnnnnnnnnnnnnnnnnnnnnnnnnnnnnnnnnnnnnnnnnnnnnnnnnnnnnnnnnnnnnnnnnnnnnnnnnnnnnnnnnnnnnnnnnnnnnnnnnnnnnnnnnnnnnnnnnnnnnnnnnnnnnnnnnnnnnnnnnnnnnnnnnnnnnnnnnnnnnnnnnnnnnnnnnnnnnnnnnnnnnnnnnnnnnnnnnnnnnnnnnnnnnnnnnnnnnnnnnnnnnnnnnnnnnnnnnnnnnnnnnnnnnnnnnnnnnnnnnnnnnnnnnnnnnnnnnnnnnnnnnnnnnnnnnnnnnnnnnnnnnnnnnnnnnnnnnnnnnnnnnnnnnnnnnnnnnnnnnnnnnnnnnnnnnnnnnnnnnnnnnnnnnnnnnnnnnnnnnnnnnnnnnnnnnnnnnnnnnnnnnnnnnnnnnnnnnnnnnnnnnnnnnnnnnnnnnnnnnnnnnnnnnnnnnnnnnnnnnnnnnnnnnnnnnnnnnnnnnnnnnnnnnnnnnnnnnnnnnnnnnnnnnnnnnnnnnnnnnnnnnnnnnnnnnnnnnnnnnnnnnnnnnnnnnnnnnnnnnnnnnnnnnnnnnnnnnnnnnnnnnnnnnnnnnnnnnnnnnnnnnnnnnnnnnnnnnnnnnnnnnnnnnnnnnnnnnnnnnnnnnnnnnnnnnnnnnnnnnnnnnnnnnnnnnnnnnnnnnnnnnnnnnnnnnnnnnnnnnnnnnnnnnnnnnnnnnnnnnnnnnnnnnnnnnnnnnnnnnnnnnnnnnnnnnnnnnnnnnnnnnnnnnnnnnnnnnnnnnnnnnnnnnnnnnnnnnnnnnnnnnnnnnnnnnnnnnnnnnnnnnnnnnnnnnnnnnnnnnnnnnnnnnnnnnnnnnnnnnnnnnnnnnnnnnnnnnnnnnnnnnnnnnnnnnnnnnnnnnnnnnnnnnnnnnnnnnnnnnnnnnnnnnnnnnnnnnnnnnnnnnnnnnnnnnnnnnnnnnnnnnnnnnnnnnnnnnnnnnnnnnnnnnnnnnnnnnnnnnnnnnnnnnnnnnnnnnnnnnnnnnnnnnnnnnnnnnnnnnnnnnnnnnnnnnnnnnnnnnnnnnnnnnnnnnnnnnnnnnnnnnnnnnnnnnnnnnnnnnnnnnnnnnnnnnnnnnnnnnnnnnnnnnnnnnnnnnnnnnnnnnnnnnnnnnnnnnnnnnnnnnnnnnnnnnnnnnnnnnnnnnnnnnnnnnnnnnnnnnnnnnnnnnnnnnnnnnnnnnnnnnnnnnnnnnnnnnnnnnnnnnnnnnnnnnnnnnnnnnnnnnnnnnnnnnnnnnnnnnnnnnnnnnnnnnnnnnnnnnnnnnnnnnnnnnnnnnnnnnnnnnnnnnnnnnnnnnnnnnnnnnnnnnnnnnnnnnnnnnnnnnnnnnnnnnnnnnnnnnnnnnnnnnnnnnnnnnnnnnnnnnnnnnnnnnnnnnnnnnnnnnnnnnnnnnnnnnnnnnnnnnnnnnnnnnnnnnnnnnnnnnnnnnnnnnnnnnnnnnnnnnnnnnnnnnnnnnnnnnnnnnnnnnnnnnnnnnnnnnnnnnnnnnnnnnnnnnnnnnnnnnnnnnnnnnnnnnnnnnnnnnnnnnnnnnnnnnnnnnnnnnnnnnnnnnnnnnnnnnnnnnnnnnnnnnnnnnnnnnnnnnnnnnnnnnnnnnnnnnnnnnnnnnnnnnnnnnnnnnnnnnnnnnnnnnnnnnnnnnnnnnnnnnnnnnnnnnnnnnnnnnnnnnnnnnnnnnnnnnnnnnnnnnnnnnnnnnnnnnnnnnnnnnnnnnnnnnnnnnnnnnnnnnnnnnnnnnnnnnnnnnnnnnnnnnnnnnnnnnnnnnnnnnnnnnnnnnnnnnnnnnnnnnnnnnnnnnnnnnnnnnnnnnnnnnnnnnnnnnnnnnnnnnnnnnnnnnnnnnnnnnnnnnnnnnnnnnnnnnnnnnnnnnnnnnnnnnnnnnnnnnnnnnnnnnnnnnnnnnnnnnnnnnnnnnnnnnnnnnnnnnnnnnnnnnnnnnnnnnnnnnnnnnnnnnnnnnnnnnnnnnnnnnnnnnnnnnnnnnnnnnnnnnnnnnnnnnnnnnnnnnnnnnnnnnnnnnnnnnnnnnnnnnnnnnnnnnnnnnnnnnnnnnnnnnnnnnnnnnnnnnnnnnnnnnnnnnnnnnnnnnnnnnnnnnnnnnnnnnnnnnnnnnnnnnnnnnnnnnnnnnnnnnnnnnnnnnnnnnnnnnnnnnnnnnnnnnnnnnnnnnnnnnnnnnnnnnnnnnnnnnnnnnnnnnnnnnnnnnnnnnnnnnnnnnnnnnnnnnnnnnnnnnnnnnnnnnnnnnnnnnnnnnnnnnnnnnnnnnnnnnnnnnnnnnnnnnnnnnnnnnnnnnnnnnnnnnnnnnnnnnnnnnnnnnnnnnnnnnnnnnnnnnnnnnnnnnnnnnnnnnnnnnnnnnnnnnnnnnnnnnnnnnnnnnnnnnnnnnnnnnnnnnnnnnnnnnnnnnnnnnnnnnnnnnnnnnnnnnnnnnnnnnnnnnnnnnnnnnnnnnnnnnnnnnnnnnnnnnnnnnnnnnnnnnnnnnnnnnnnnnnnnnnnnnnnnnnnnnnnnnnnnnnnnnnnnnnnnnnnnnnnnnnnnnnnnnnnnnnnnnnnnnnnnnnnnnnnnnnnnnnnnnnnnnnnnnnnnnnnnnnnnnnnnnnnnnnnnnnnnnnnnnnnnnnnnnnnnnnnnnnnnnnnnnnnnnnnnnnnnnnnnnnnnnnnnnnnnnnnnnnnnnnnnnnnnnnnnnnnnnnnnnnnnnnnnnnnnnnnnnnnnnnnnnnnnnnnnnnnnnnnnnnnnnnnnnnnnnnnnnnnnnnnnnnnnnnnnnnnnnnnnnnnnnnnnnnnnnnnnnnnnnnnnnnnnnnnnnnnnnnnnnnnnnnnnnnnnnnnnnnnnnnnnnnnnnnnnnnnnnnnnnnnnnnnnnnnnnnnnnnnnnnnnnnnnnnnnnnnnnnnnnnnnnnnnnnnnnnnnnnnnnnnnnnnnnnnnnnnnnnnnnnnnnnnnnnnnnnnnnnnnnnnnnnnnnnnnnnnnnnnnnnnnnnnnnnnnnnnnnnnnnnnnnnnnnnnnnnnnnnnnnnnnnnnnnnnnnnnnnnnnnnnnnnnnnnnnnnnnnnnnnnnnnnnnnnnnnnnnnnnnnnnnnnnnnnnnnnnnnnnnnnnnnnnnnnnnnnnnnnnnnnnnnnnnnnnnnnnnnnnnnnnnnnnnnnnnnnnnnnnnnnnnnnnnnnnnnnnnnnnnnnnnnnnnnnnnnnnnnnnnnnnnnnnnnnnnnnnnnnnnnnnnnnnnnnnnnnnnnnnnnnnnnnnnnnnnnnnnnnnnnnnnnnnnnnnnnnnnnnnnnnnnnnnnnnnnnnnnnnnnnnnnnnnnnnnnnnnnnnnnnnnnnnnnnnnnnnnnnnnnnnnnnnnnnnnnnnnnnnnnnnnnnnnnnnnnnnnnnnnnnnnnnnnnnnnnnnnnnnnnnnnnnnnnnnnnnnnnnnnnnnnnnnnnnnnnnnnnnnnnnnnnnnnnnnnnnnnnnnnnnnnnnnnnnnnnnnnnnnnnnnnnnnnnnnnnnnnnnnnnnnnnnnnnnnnnnnnnnnnnnnnnnnnnnnnnnnnnnnnnnnnnnnnnnnnnnnnnnnnnnnnnnnnnnnnnnnnnnnnnnnnnnnnnnnnnnnnnnnnnnnnnnnnnnnnnnnnnnnnnnnnnnnnnnnnnnnnnnnnnnnnnnnnnnnnnnnnnnnnnnnnnnnnnnnnnnnnnnnnnnnnnnnnnnnnnnnnnnnnnnnnnnnnnnnnnnnnnnnnnnnnnnnnnnnnnnnnnnnnnnnnnnnnnnnnnnnnnnnnnnnnnnnnnnnnnnnnnnnnnnnnnnnnnnnnnnnnnnnnnnnnnnnnnnnnnnnnnnnnnnnnnnnnnnnnnnnnnnnnnnnnnnnnnnnnnnnnnnnnnnnnnnnnnnnnnnnnnnnnnnnnnnnnnnnnnnnnnnnnnnnnnnnnnnnnnnnnnnnnnnnnnnnnnnnnnnnnnnnnnnnnnnnnnnnnnnnnnnnnnnnnnnnnnnnnnnnnnnnnnnnnnnnnnnnnnnnnnnnnnnnnnnnnnnnnnnnnnnnnnnnnnnnnnnnnnnnnnnnnnnnnnnnnnnnnnnnnnnnnnnnnnnnnnnnnnnnnnnnnnnnnnnnnnnnnnnnnnnnnnnnnnnnnnnnnnnnnnnnnnnnnnnnnnnnnnnnnnnnnnnnnnnnnnnnnnnnnnnnnnnnnnnnnnnnnnnnnnnnnnnnnnnnnnnnnnnnnnnnnnnnnnnnnnnnnnnnnnnnnnnnnnnnnnnnnnnnnnnnnnnnnnnnnnnnnnnnnnnnnnnnnnnnnnnnnnnnnnnnnnnnnnnnnnnnnnnnnnnnnnnnnnnnnnnnnnnnnnnnnnnnnnnnnnnnnnnnnnnnnnnnnnnnnnnnnnnnnnnnnnnnnnnnnnnnnnnnnnnnnnnnnnnnnnnnnnnnnnnnnnnnnnnnnnnnnnnnnnnnnnnnnnnnnnnnnnnnnnnnnnnnnnnnnnnnnnnnnnnnnnnnnnnnnnnnnnnnnnnnnnnnnnnnnnnnnnnnnnnnnnnnnnnnnnnnnnnnnnnnnnnnnnnnnnnnnnnnnnnnnnnnnnnnnnnnnnnnnnnnnnnnnnnnnnnnnnnnnnnnnnnnnnnnnnnnnnnnnnnnnnnnnnnnnnnnnnnnnnnnnnnnnnnnnnnnnnnnnnnnnnnnnnnnnnnnnnnnnnnnnnnnnnnnnnnnnnnnnnnnnnnnnnnnnnnnnnnnnnnnnnnnnnnnnnnnnnnnnnnnnnnnnnnnnnnnnnnnnnnnnnnnnnnnnnnnnnnnnnnnnnnnnnnnnnnnnnnnnnnnnnnnnnnnnnnnnnnnnnnnnnnnnnnnnnnnnnnnnnnnnnnnnnnnnnnnnnnnnnnnnnnnnnnnnnnnnnnnnnnnnnnnnnnnnnnnnnnnnnnnnnnnnnnnnnnnnnnnnnnnnnnnnnnnnnnnnnnnnnnnnnnnnnnnnnnnnnnnnnnnnnnnnnnnnnnnnnnnnnnnnnnnnnnnnnnnnnnnnnnnnnnnnnnnnnnnnnnnnnnnnnnnnnnnnnnnnnnnnnnnnnnnnnnnnnnnnnnnnnnnnnnnnnnnnnnnnnnnnnnnnnnnnnnnnnnnnnnnnnnnnnnnnnnnnnnnnnnnnnnnnnnnnnnnnnnnnnnnnnnnnnnnnnnnnnnnnnnnnnnnnnnnnnnnnnnnnnnnnnnnnnnnnnnnnnnnnnnnnnnnnnnnnnnnnnnnnnnnnnnnnnnnnnnnnnnnnnnnnnnnnnnnnnnnnnnnnnnnnnnnnnnnnnnnnnnnnnnnnnnnnnnnnnnnnnnnnnnnnnnnnnnnnnnnnnnnnnnnnnnnnnnnnnnnnnnnnnnnnnnnnnnnnnnnnnnnnnnnnnnnnnnnnnnnnnnnnnnnnnnnnnnnnnnnnnnnnnnnnnnnnnnnnnnnnnnnnnnnnnnnnnnnnnnnnnnnnnnnnnnnnnnnnnnnnnnnnnnnnnnnnnnnnnnnnnnnnnnnnnnnnnnnnnnnnnnnnnnnnnnnnnnnnnnnnnnnnnnnnnnnnnnnnnnnnnnnnnnnnnnnnnnnnnnnnnnnnnnnnnnnnnnnnnnnnnnnnnnnnnnnnnnnnnnnnnnnnnnnnnnnnnnnnnnnnnnnnnnnnnnnnnnnnnnnnnnnnnnnnnnnnnnnnnnnnnnnnnnnnnnnnnnnnnnnnnnnnnnnnnnnnnnnnnnnnnnnnnnnnnnnnnnnnnnnnnnnnnnnnnnnnnnnnnnnnnnnnnnnnnnnnnnnnnnnnnnnnnnnnnnnnnnnnnnnnnnnnnnnnnnnnnnnnnnnnnnnnnnnnnnnnnnnnnnnnnnnnnnnnnnnnnnnnnnnnnnnnnnnnnnnnnnnnnnnnnnnnnnnnnnnnnnnnnnnnnnnnnnnnnnnnnnnnnnnnnnnnnnnnnnnnnnnnnnnnnnnnnnnnnnnnnnnnnnnnnnnnnnnnnnnnnnnnnnnnnnnnnnnnnnnnnnnnnnnnnnnnnnnnnnnnnnnnnnnnnnnnnnnnnnnnnnnnnnnnnnnnnnnnnnnnnnnnnnnnnnnnnnnnnnnnnnnnnnnnnnnnnnnnnnnnnnnnnnnnnnnnnnnnnnnnnnnnnnnnnnnnnnnnnnnnnnnnnnnnnnnnnnnnnnnnnnnnnnnnnnnnnnnnnnnnnnnnnnnnnnnnnnnnnnnnnnnnnnnnnnnnnnnnnnnnnnnnnnnnnnnnnnnnnnnnnnnnnnnnnnnnnnnnnnnnnnnnnnnnnnnnnnnnnnnnnnnnnnnnnnnnnnnnnnnnnnnnnnnnnnnnnnnnnnnnnnnnnnnnnnnnnnnnnnnnnnnnnnnnnnnnnnnnnnnnnnnnnnnnnnnnnnnnnnnnnnnnnnnnnnnnnnnnnnnnnnnnnnnnnnnnnnnnnnnnnnnnnnnnnnnnnnnnnnnnnnnnnnnnnnnnnnnnnnnnnnnnnnnnnnnnnnnnnnnnnnnnnnnnnnnnnnnnnnnnnnnnnnnnnnnnnnnnnnnnnnnnnnnnnnnnnnnnnnnnnnnnnnnnnnnnnnnnnnnnnnnnnnnnnnnnnnnnnnnnnnnnnnnnnnnnnnnnnnnnnnnnnnnnnnnnnnnnnnnnnnnnnnnnnnnnnnnnnnnnnnnnnnnnnnnnnnnnnnnnnnnnnnnnnnnnnnnnnnnnnnnnnnnnnnnnnnnnnnnnnnnnnnnnnnnnnnnnnnnnnnnnnnnnnnnnnnnnnnnnnnnnnnnnnnnnnnnnnnnnnnnnnnnnnnnnnnnnnnnnnnnnnnnnnnnnnnnnnnnnnnnnnnnnnnnnnnnnnnnnnnnnnnnnnnnnnnnnnnnnnnnnnnnnnnnnnnnnnnnnnnnnnnnnnnnnnnnnnnnnnnnnnnnnnnnnnnnnnnnnnnnnnnnnnnnnnnnnnnnnnnnnnnnnnnnnnnnnnnnnnnnnnnnnnnnnnnnnnnnnnnnnnnnnnnnnnnnnnnnnnnnnnnnnnnnnnnnnnnnnnnnnnnnnnnnnnnnnnnnnnnnnnnnnnnnnnnnnnnnnnnnnnnnnnnnnnnnnnnnnnnnnnnnnnnnnnnnnnnnnnnnnnnnnnnnnnnnnnnnnnnnnnnnnnnnnnnnnnnnnnnnnnnnnnnnnnnnnnnnnnnnnnnnnnnnnnnnnnnnnnnnnnnnnnnnnnnnnnnnnnnnnnnnnnnnnnnnnnnnnnnnnnnnnnnnnnnnnnnnnnnnnnnnnnnnnnnnnnnnnnnnnnnnnnnnnnnnnnnnnnnnnnnnnnnnnnnnnnnnnnnnnnnnnnnnnnnnnnnnnnnnnnnnnnnnnnnnnnnnnnnnnnnnnnnnnnnnnnnnnnnnnnnnnnnnnnnnnnnnnnnnnnnnnnnnnnnnnnnnnnnnnnnnnnnnnnnnnnnnnnnnnnnnnnnnnnnnnnnnnnnnnnnnnnnnnnnnnnnnnnnnnnnnnnnnnnnnnnnnnnnnnnnnnnnnnnnnnnnnnnnnnnnnnnnnnnnnnnnnnnnnnnnnnnnnnnnnnnnnnnnnnnnnnnnnnnnnnnnnnnnnnnnnnnnnnnnnnnnnnnnnnnnnnnnnnnnnnnnnnnnnnnnnnnnnnnnnnnnnnnnnnnnnnnnnnnnnnnnnnnnnnnnnnnnnnnnnnnnnnnnnnnnnnnnnnnnnnnnnnnnnnnnnnnnnnnnnnnnnnnnnnnnnnnnnnnnnnnnnnnnnnnnnnnnnnnnnnnnnnnnnnnnnnnnnnnnnnnnnnnnnnnnnnnnnnnnnnnnnnnnnnnnnnnnnnnnnnnnnnnnnnnnnnnnnnnnnnnnnnnnnnnnnnnnnnnnnnnnnnnnnnnnnnnnnnnnnnnnnnnnnnnnnnnnnnnnnnnnnnnnnnnnnnnnnnnnnnnnnnnnnnnnnnnnnnnnnnnnnnnnnnnnnnnnnnnnnnnnnnnnnnnnnnnnnnnnnnnnnnnnnnnnnnnnnnnnnnnnnnnnnnnnnnnnnnnnnnnnnnnnnnnnnnnnnnnnnnnnnnnnnnnnnnnnnnnnnnnnnnnnnnnnnnnnnnnnnnnnnnnnnnnnnnnnnnnnnnnnnnnnnnnnnnnnnnnnnnnnnnnnnnnnnnnnnnnnnnnnnnnnnnnnnnnnnnnnnnnnnnnnnnnnnnnnnnnnnnnnnnnnnnnnnnnnnnnnnnnnnnnnnnnnnnnnnnnnnnnnnnnnnnnnnnnnnnnnnnnnnnnnnnnnnnnnnnnnnnnnnnnnnnnnnnnnnnnnnnnnnnnnnnnnnnnnnnnnnnnnnnnnnnnnnnnnnnnnnnnnnnnnnnnnnnnnnnnnnnnnnnnnnnnnnnnnnnnnnnnnnnnnnnnnnnnnnnnnnnnnnnnnnnnnnnnnnnnnnnnnnnnnnnnnnnnnnnnnnnnnnnnnnnnnnnnnnnnnnnnnnnnnnnnnnnnnnnnnnnnnnnnnnnnnnnnnnnnnnnnnnnnnnnnnnnnnnnnnnnnnnnnnnnnnnnnnnnnnnnnnnnnnnnnnnnnnnnnnnnnnnnnnnnnnnnnnnnnnnnnnnnnnnnnnnnnnnnnnnnnnnnnnnnnnnnnnnnnnnnnnnnnnnnnnnnnnnnnnnnnnnnnnnnnnnnnnnnnnnnnnnnnnnnnnnnnnnnnnnnnnnnnnnnnnnnnnnnnnnnnnnnnnnnnnnnnnnnnnnnnnnnnnnnnnnnnnnnnnnnnnnnnnnnnnnnnnnnnnnnnnnnnnnnnnnnnnnnnnnnnnnnnnnnnnnnnnnnnnnnnnnnnnnnnnnnnnnnnnnnnnnnnnnnnnnnnnnnnnnnnnnnnnnnnnnnnnnnnnnnnnnnnnnnnnnnnnnnnnnnnnnnnnnnnnnnnnnnnnnnnnnnnnnnnnnnnnnnnnnnnnnnnnnnnnnnnnnnnnnnnnnnnnnnnnnnnnnnnnnnnnnnnnnnnnnnnnnnnnnnnnnnnnnnnnnnnnnnnnnnnnnnnnnnnnnnnnnnnnnnnnnnnnnnnnnnnnnnnnnnnnnnnnnnnnnnnnnnnnnnnnnnnnnnnnnnnnnnnnnnnnnnnnnnnnnnnnnnnnnnnnnnnnnnnnnnnnnnnnnnnnnnnnnnnnnnnnnnnnnnnnnnnnnnnnnnnnnnnnnnnnnnnnnnnnnnnnnnnnnnnnnnnnnnnnnnnnnnnnnnnnnnnnnnnnnnnnnnnnnnnnnnnnnnnnnnnnnnnnnnnnnnnnnnnnnnnnnnnnnnnnnnnnnnnnnnnnnnnnnnnnnnnnnnnnnnnnnnnnnnnnnnnnnnnnnnnnnnnnnnnnnnnnnnnnnnnnnnnnnnnnnnnnnnnnnnnnnnnnnnnnnnnnnnnnnnnnnnnnnnnnnnnnnnnnnnnnnnnnnnnnnnnnnnnnnnnnnnnnnnnnnnnnnnnnnnnnnnnnnnnnnnnnnnnnnnnnnnnnnnnnnnnnnnnnnnnnnnnnnnnnnnnnnnnnnnnnnnnnnnnnnnnnnnnnnnnnnnnnnnnnnnnnnnnnnnnnnnnnnnnnnnnnnnnnnnnnnnnnnnnnnnnnnnnnnnnnnnnnnnnnnnnnnnnnnnnnnnnnnnnnnnnnnnnnnnnnnnnnnnnnnnnnnnnnnnnnnnnnnnnnnnnnnnnnnnnnnnnnnnnnnnnnnnnnnnnnnnnnnnnnnnnnnnnnnnnnnnnnnnnnnnnnnnnnnnnnnnnnnnnnnnnnnnnnnnnnnnnnnnnnnnnnnnnnnnnnnnnnnnnnnnnnnnnnnnnnnnnnnnnnnnnnnnnnnnnnnnnnnnnnnnnnnnnnnnnnnnnnnnnnnnnnnnnnnnnnnnnnnnnnnnnnnnnnnnnnnnnnnnnnnnnnnnnnnnnnnnnnnnnnnnnnnnnnnnnnnnnnnnnnnnnnnnnnnnnnnnnnnnnnnnnnnnnnnnnnnnnnnnnnnnnnnnnnnnnnnnnnnnnnnnnnnnnnnnnnnnnnnnnnnnnnnnnnnnnnnnnnnnnnnnnnnnnnnnnnnnnnnnnnnnnnnnnnnnnnnnnnnnnnnnnnnnnnnnnnnnnnnnnnnnnnnnnnnnnnnnnnnnnnnnnnnnnnnnnnnnnnnnnnnnnnnnnnnnnnnnnnnnnnnnnnnnnnnnnnnnnnnnnnnnnnnnnnnnnnnnnnnnnnnnnnnnnnnnnnnnnnnnnnnnnnnnnnnnnnnnnnnnnnnnnnnnnnnnnnnnnnnnnnnnnnnnnnnnnnnnnnnnnnnnnnnnnnnnnnnnnnnnnnnnnnnnnnnnnnnnnnnnnnnnnnnnnnnnnnnnnnnnnnnnnnnnnnnnnnnnnnnnnnnnnnnnnnnnnnnnnnnnnnnnnnnnnnnnnnnnnnnnnnnnnnnnnnnnnnnnnnnnnnnnnnnnnnnnnnnnnnnnnnnnnnnnnnnnnnnnnnnnnnnnnnnnnnnnnnnnnnnnnnnnnnnnnnnnnnnnnnnnnnnnnnnnnnnnnnnnnnnnnnnnnnnnnnnnnnnnnnnnnnnnnnnnnnnnnnnnnnnnnnnnnnnnnnnnnnnnnnnnnnnnnnnnnnnnnnnnnnnnnnnnnnnnnnnnnnnnnnnnnnnnnnnnnnnnnnnnnnnnnnnnnnnnnnnnnnnnnnnnnnnnnnnnnnnnnnnnnnnnnnnnnnnnnnnnnnnnnnnnnnnnnnnnnnnnnnnnnnnnnnnnnnnnnnnnnnnnnnnnnnnnnnnnnnnnnnnnnnnnnnnnnnnnnnnnnnnnnnnnnnnnnnnnnnnnnnnnnnnnnnnnnnnnnnnnnnnnnnnnnnnnnnnnnnnnnnnnnnnnnnnnnnnnnnnnnnnnnnnnnnnnnnnnnnnnnnnnnnnnnnnnnnnnnnnnnnnnnnnnnnnnnnnnnnnnnnnnnnnnnnnnnnnnnnnnnnnnnnnnnnnnnnnnnnnnnnnnnnnnnnnnnnnnnnnnnnnnnnnnnnnnnnnnnnnnnnnnnnnnnnnnnnnnnnnnnnnnnnnnnnnnnnnnnnnnnnnnnnnnnnnnnnnnnnnnnnnnnnnnnnnnnnnnnnnnnnnnnnnnnnnnnnnnnnnnnnnnnnnnnnnnnnnnnnnnnnnnnnnnnnnnnnnnnnnnnnnnnnnnnnnnnnnnnnnnnnnnnnnnnnnnnnnnnnnnnnnnnnnnnnnnnnnnnnnnnnnnnnnnnnnnnnnnnnnnnnnnnnnnnnnnnnnnnnnnnnnnnnnnnnnnnnnnnnnnnnnnnnnnnnnnnnnnnnnnnnnnnnnnnnnnnnnnnnnnnnnnnnnnnnnnnnnnnnnnnnnnnnnnnnnnnnnnnnnnnnnnnnnnnnnnnnnnnnnnnnnnnnnnnnnnnnnnnnnnnnnnnnnnnnnnnnnnnnnnnnnnnnnnnnnnnnnnnnnnnnnnnnnnnnnnnnnnnnnnnnnnnnnnnnnnnnnnnnnnnnnnnnnnnnnnnnnnnnnnnnnnnnnnnnnnnnnnnnnnnnnnnnnnnnnnnnnnnnnnnnnnnnnnnnnnnnnnnnnnnnnnnnnnnnnnnnnnnnnnnnnnnnnnnnnnnnnnnnnnnnnnnnnnnnnnnnnnnnnnnnnnnnnnnnnnnnnnnnnnnnnnnnnnnnnnnnnnnnnnnnnnnnnnnnnnnnnnnnnnnnnnnnnnnnnnnnnnnnnnnnnnnnnnnnnnnnnnnnnnnnnnnnnnnnnnnnnnnnnnnnnnnnnnnnnnnnnnnnnnnnnnnnnnnnnnnnnnnnnnnnnnnnnnnnnnnnnnnnnnnnnnnnnnnnnnnnnnnnnnnnnnnnnnnnnnnnnnnnnnnnnnnnnnnnnnnnnnnnnnnnnnnnnnnnnnnnnnnnnnnnnnnnnnnnnnnnnnnnnnnnnnnnnnnnnnnnnnnnnnnnnnnnnnnnnnnnnnnnnnnnnnnnnnnnnnnnnnnnnnnnnnnnnnnnnnnnnnnnnnnnnnnnnnnnnnnnnnnnnnnnnnnnnnnnnnnnnnnnnnnnnnnnnnnnnnnnnnnnnnnnnnnnnnnnnnnnnnnnnnnnnnnnnnnnnnnnnnnnnnnnnnnnnnnnnnnnnnnnnnnnnnnnnnnnnnnnnnnnnnnnnnnnnnnnnnnnnnnnnnnnnnnnnnnnnnnnnnnnnnnnnnnnnnnnnnnnnnnnnnnnnnnnnnnnnnnnnnnnnnnnnnnnnnnnnnnnnnnnnnnnnnnnnnnnnnnnnnnnnnnnnnnnnnnnnnnnnnnnnnnnnnnnnnnnnnnnnnnnnnnnnnnnnnnnnnnnnnnnnnnnnnnnnnnnnnnnnnnnnnnnnnnnnnnnnnnnnnnnnnnnnnnnnnnnnnnnnnnnnnnnnnnnnnnnnnnnnnnnnnnnnnnnnnnnnnnnnnnnnnnnnnnnnnnnnnnnnnnnnnnnnnnnnnnnnnnnnnnnnnnnnnnnnnnnnnnnnnnnnnnnnnnnnnnnnnnnnnnnnnnnnnnnnnnnnnnnnnnnnnnnnnnnnnnnnnnnnnnnnnnnnnnnnnnnnnnnnnnnnnnnnnnnnnnnnnnnnnnnnnnnnnnnnnnnnnnnnnnnnnnnnnnnnnnnnnnnnnnnnnnnnnnnnnnnnnnnnnnnnnnnnnnnnnnnnnnnnnnnnnnnnnnnnnnnnnnnnnnnnnnnnnnnnnnnnnnnnnnnnnnnnnnnnnnnnnnnnnnnnnnnnnnnnnnnnnnnnnnnnnnnnnnnnnnnnnnnnnnnnnnnnnnnnnnnnnnnnnnnnnnnnnnnnnnnnnnnnnnnnnnnnnnnnnnnnnnnnnnnnnnnnnnnnnnnnnnnnnnnnnnnnnnnnnnnnnnnnnnnnnnnnnnnnnnnnnnnnnnnnnnnnnnnnnnnnnnnnnnnnnnnnnnnnnnnnnnnnnnnnnnnnnnnnnnnnnnnnnnnnnnnnnnnnnnnnnnnnnnnnnnnnnnnnnnnnnnnnnnnnnnnnnnnnnnnnnnnnnnnnnnnnnnnnnnnnnnnnnnnnnnnnnnnnnnnnnnnnnnnnnnnnnnnnnnnnnnnnnnnnnnnnnnnnnnnnnnnnnnnnnnnnnnnnnnnnnnnnnnnnnnnnnnnnnnnnnnnnnnnnnnnnnnnnnnnnnnnnnnnnnnnnnnnnnnnnnnnnnnnnnnnnnnnnnnnnnnnnnnnnnnnnnnnnnnnnnnnnnnnnnnnnnnnnnnnnnnnnnnnnnnnnnnnnnnnnnnnnnnnnnnnnnnnnnnnnnnnnnnnnnnnnnnnnnnnnnnnnnnnnnnnnnnnnnnnnnnnnnnnnnnnnnnnnnnnnnnnnnnnnnnnnnnnnnnnnnnnnnnnnnnnnnnnnnnnnnnnnnnnnnnnnnnnnnnnnnnnnnnnnnnnnnnnnnnnnnnnnnnnnnnnnnnnnnnnnnnnnnnnnnnnnnnnnnnnnnnnnnnnnnnnnnnnnnnnnnnnnnnnnnnnnnnnnnnnnnnnnnnnnnnnnnnnnnnnnnnnnnnnnnnnnnnnnnnnnnnnnnnnnnnnnnnnnnnnnnnnnnnnnnnnnnnnnnnnnnnnnnnnnnnnnnnnnnnnnnnnnnnnnnnnnnnnnnnnnnnnnnnnnnnnnnnnnnnnnnnnnnnnnnnnnnnnnnnnnnnnnnnnnnnnnnnnnnnnnnnnnnnnnnnnnnnnnnnnnnnnnnnnnnnnnnnnnnnnnnnnnnnnnnnnnnnnnnnnnnnnnnnnnnnnnnnnnnnnnnnnnnnnnnnnnnnnnnnnnnnnnnnnnnnnnnnnnnnnnnnnnnnnnnnnnnnnnnnnnnnnnnnnnnnnnnnnnnnnnnnnnnnnnnnnnnnnnnnnnnnnnnnnnnnnnnnnnnnnnnnnnnnnnnnnnnnnnnnnnnnnnnnnnnnnnnnnnnnnnnnnnnnnnnnnnnnnnnnnnnnnnnnnnnnnnnnnnnnnnnnnnnnnnnnnnnnnnnnnnnnnnnnnnnnnnnnnnnnnnnnnnnnnnnnnnnnnnnnnnnnnnnnnnnnnnnnnnnnnnnnnnnnnnnnnnnnnnnnnnnnnnnnnnnnnnnnnnnnnnnnnnnnnnnnnnnnnnnnnnnnnnnnnnnnnnnnnnnnnnnnnnnnnnnnnnnnnnnnnnnnnnnnnnnnnnnnnnnnnnnnnnnnnnnnnnnnnnnnnnnnnnnnnnnnnnnnnnnnnnnnnnnnnnnnnnnnnnnnnnnnnnnnnnnnnnnnnnnnnnnnnnnnnnnnnnnnnnnnnnnnnnnnnnnnnnnnnnnnnnnnnnnnnnnnnnnnnnnnnnnnnnnnnnnnnnnnnnnnnnnnnnnnnnnnnnnnnnnnnnnnnnnnnnnnnnnnnnnnnnnnnnnnnnnnnnnnnnnnnnnnnnnnnnnnnnnnnnnnnnnnnnnnnnnnnnnnnnnnnnnnnnnnnnnnnnnnnnnnnnnnnnnnnnnnnnnnnnnnnnnnnnnnnnnnnnnnnnnnnnnnnnnnnnnnnnnnnnnnnnnnnnnnnnnnnnnnnnnnnnnnnnnnnnnnnnnnnnnnnnnnnnnnnnnnnnnnnnnnnnnnnnnnnnnnnnnnnnnnnnnnnnnnnnnnnnnnnnnnnnnnnnnnnnnnnnnnnnnnnnnnnnnnnnnnnnnnnnnnnnnnnnnnnnnnnnnnnnnnnnnnnnnnnnnnnnnnnnnnnnnnnnnnnnnnnnnnnnnnnnnnnnnnnnnnnnnnnnnnnnnnnnnnnnnnnnnnnnnnnnnnnnnnnnnnnnnnnnnnnnnnnnnnnnnnnnnnnnnnnnnnnnnnnnnnnnnnnnnnnnnnnnnnnnnnnnnnnnnnnnnnnnnnnnnnnnnnnnnnnnnnnnnnnnnnnnnnnnnnnnnnnnnnnnnnnnnnnnnnnnnnnnnnnnnnnnnnnnnnnnnnnnnnnnnnnnnnnnnnnnnnnnnnnnnnnnnnnnnnnnnnnnnnnnnnnnnnnnnnnnnnnnnnnnnnnnnnnnnnnnnnnnnnnnnnnnnnnnnnnnnnnnnnnnnnnnnnnnnnnnnnnnnnnnnnnnnnnnnnnnnnnnnnnnnnnnnnnnnnnnnnnnnnnnnnnnnnnnnnnnnnnnnnnnnnnnnnnnnnnnnnnnnnnnnnnnnnnnnnnnnnnnnnnnnnnnnnnnnnnnnnnnnnnnnnnnnnnnnnnnnnnnnnnnnnnnnnnnnnnnnnnnnnnnnnnnnnnnnnnnnnnnnnnnnnnnnnnnnnnnnnnnnnnnnnnnnnnnnnnnnnnnnnnnnnnnnnnnnnnnnnnnnnnnnnnnnnnnnnnnnnnnnnnnnnnnnnnnnnnnnnnnnnnnnnnnnnnnnnnnnnnnnnnnnnnnnnnnnnnnnnnnnnnnnnnnnnnnnnnnnnnnnnnnnnnnnnnnnnnnnnnnnnnnnnnnnnnnnnnnnnnnnnnnnnnnnnnnnnnnnnnnnnnnnnnnnnnnnnnnnnnnnnnnnnnnnnnnnnnnnnnnnnnnnnnnnnnnnnnnnnnnnnnnnnnnnnnnnnnnnnnnnnnnnnnnnnnnnnnnnnnnnnnnnnnnnnnnnnnnnnnnnnnnnnnnnnnnnnnnnnnnnnnnnnnnnnnnnnnnnnnnnnnnnnnnnnnnnnnnnnnnnnnnnnnnnnnnnnnnnnnnnnnnnnnnnnnnnnnnnnnnnnnnnnnnnnnnnnnnnnnnnnnnnnnnnnnnnnnnnnnnnnnnnnnnnnnnnnnnnnnnnnnnnnnnnnnnnnnnnnnnnnnnnnnnnnnnnnnnnnnnnnnnnnnnnnnnnnnnnnnnnnnnnnnnnnnnnnnnnnnnnnnnnnnnnnnnnnnnnnnnnnnnnnnnnnnnnnnnnnnnnnnnnnnnnnnnnnnnnnnnnnnnnnnnnnnnnnnnnnnnnnnnnnnnnnnnnnnnnnnnnnnnnnnnnnnnnnnnnnnnnnnnnnnnnnnnnnnnnnnnnnnnnnnnnnnnnnnnnnnnnnnnnnnnnnnnnnnnnnnnnnnnnnnnnnnnnnnnnnnnnnnnnnnnnnnnnnnnnnnnnnnnnnnnnnnnnnnnnnnnnnnnnnnnnnnnnnnnnnnnnnnnnnnnnnnnnnnnnnnnnnnnnnnnnnnnnnnnnnnnnnnnnnnnnnnnnnnnnnnnnnnnnnnnnnnnnnnnnnnnnnnnnnnnnnnnnnnnnnnnnnnnnnnnnnnnnnnnnnnnnnnnnnnnnnnnnnnnnnnnnnnnnnnnnnnnnnnnnnnnnnnnnnnnnnnnnnnnnnnnnnnnnnnnnnnnnnnnnnnnnnnnnnnnnnnnnnnnnnnnnnnnnnnnnnnnnnnnnnnnnnnnnnnnnnnnnnnnnnnnnnnnnnnnnnnnnnnnnnnnnnnnnnnnnnnnnnnnnnnnnnnnnnnnnnnnnnnnnnnnnnnnnnnnnnnnnnnnnnnnnnnnnnnnnnnnnnnnnnnnnnnnnnnnnnnnnnnnnnnnnnnnnnnnnnnnnnnnnnnnnnnnnnnnnnnnnnnnnnnnnnnnnnnnnnnnnnnnnnnnnnnnnnnnnnnnnnnnnnnnnnnnnnnnnnnnnnnnnnnnnnnnnnnnnnnnnnnnnnnnnnnnnnnnnnnnnnnnnnnnnnnnnnnnnnnnnnnnnnnnnnnnnnnnnnnnnnnnnnnnnnnnnnnnnnnnnnnnnnnnnnnnnnnnnnnnnnnnnnnnnnnnnnnnnnnnnnnnnnnnnnnnnnnnnnnnnnnnnnnnnnnnnnnnnnnnnnnnnnnnnnnnnnnnnnnnnnnnnnnnnnnnnnnnnnnnnnnnnnnnnnnnnnnnnnnnnnnnnnnnnnnnnnnnnnnnnnnnnnnnnnnnnnnnnnnnnnnnnnnnnnnnnnnnnnnnnnnnnnnnnnnnnnnnnnnnnnnnnnnnnnnnnnnnnnnnnnnnnnnnnnnnnnnnnnnnnnnnnnnnnnnnnnnnnnnnnnnnnnnnnnnnnnnnnnnnnnnnnnnnnnnnnnnnnnnnnnnnnnnnnnnnnnnnnnnnnnnnnnnnnnnnnnnnnnnnnnnnnnnnnnnnnnnnnnnnnnnnnnnnnnnnnnnnnnnnnnnnnnnnnnnnnnnnnnnnnnnnnnnnnnnnnnnnnnnnnnnnnnnnnnnnnnnnnnnnnnnnnnnnnnnnnnnnnnnnnnnnnnnnnnnnnnnnnnnnnnnnnnnnnnnnnnnnnnnnnnnnnnnnnnnnnnnnnnnnnnnnnnnnnnnnnnnnnnnnnnnnnnnnnnnnnnnnnnnnnnnnnnnnnnnnnnnnnnnnnnnnnnnnnnnnnnnnnnnnnnnnnnnnnnnnnnnnnnnnnnnnnnnnnnnnnnnnnnnnnnnnnnnnnnnnnnnnnnnnnnnnnnnnnnnnnnnnnnnnnnnnnnnnnnnnnnnnnnnnnnnnnnnnnnnnnnnnnnnnnnnnnnnnnnnnnnnnnnnnnnnnnnnnnnnnnnnnnnnnnnnnnnnnnnnnnnnnnnnnnnnnnnnnnnnnnnnnnnnnnnnnnnnnnnnnnnnnnnnnnnnnnnnnnnnnnnnnnnnnnnnnnnnnnnnnnnnnnnnnnnnnnnnnnnnnnnnnnnnnnnnnnnnnnnnnnnnnnnnnnnnnnnnnnnnnnnnnnnnnnnnnnnnnnnnnnnnnnnnnnnnnnnnnnnnnnnnnnnnnnnnnnnnnnnnnnnnnnnnnnnnnnnnnnnnnnnnnnnnnnnnnnnnnnnnnnnnnnnnnnnnnnnnnnnnnnnnnnnnnnnnnnnnnnnnnnnnnnnnnnnnnnnnnnnnnnnnnnnnnnnnnnnnnnnnnnnnnnnnnnnnnnnnnnnnnnnnnnnnnnnnnnnnnnnnnnnnnnnnnnnnnnnnnnnnnnnnnnnnnnnnnnnnnnnnnnnnnnnnnnnnnnnnnnnnnnnnnnnnnnnnnnnnnnnnnnnnnnnnnnnnnnnnnnnnnnnnnnnnnnnnnnnnnnnnnnnnnnnnnnnnnnnnnnnnnnnnnnnnnnnnnnnnnnnnnnnnnnnnnnnnnnnnnnnnnnnnnnnnnnnnnnnnnnnnnnnnnnnnnnnnnnnnnnnnnnnnnnnnnnnnnnnnnnnnnnnnnnnnnnnnnnnnnnnnnnnnnnnnnnnnnnnnnnnnnnnnnnnnnnnnnnnnnnnnnnnnnnnnnnnnnnnnnnnnnnnnnnnnnnnnnnnnnnnnnnnnnnnnnnnnnnnnnnnnnnnnnnnnnnnnnnnnnnnnnnnnnnnnnnnnnnnnnnnnnnnnnnnnnnnnnnnnnnnnnnnnnnnnnnnnnnnnnnnnnnnnnnnnnnnnnnnnnnnnnnnnnnnnnnnnnnnnnnnnnnnnnnnnnnnnnnnnnnnnnnnnnnnnnnnnnnnnnnnnnnnnnnnnnnnnnnnnnnnnnnnnnnnnnnnnnnnnnnnnnnnnnnnnnnnnnnnnnnnnnnnnnnnnnnnnnnnnnnnnnnnnnnnnnnnnnnnnnnnnnnnnnnnnnnnnnnnnnnnnnnnnnnnnnnnnnnnnnnnnnnnnnnnnnnnnnnnnnnnnnnnnnnnnnnnnnnnnnnnnnnnnnnnnnnnnnnnnnnnnnnnnnnnnnnnnnnnnnnnnnnnnnnnnnnnnnnnnnnnnnnnnnnnnnnnnnnnnnnnnnnnnnnnnnnnnnnnnnnnnnnnnnnnnnnnnnnnnnnnnnnnnnnnnnnnnnnnnnnnnnnnnnnnnnnnnnnnnnnnnnnnnnnnnnnnnnnnnnnnnnnnnnnnnnnnnnnnnnnnnnnnnnnnnnnnnnnnnnnnnnnnnnnnnnnnnnnnnnnnnnnnnnnnnnnnnnnnnnnnnnnnnnnnnnnnnnnnnnnnnnnnnnnnnnnnnnnnnnnnnnnnnnnnnnnnnnnnnnnnnnnnnnnnnnnnnnnnnnnnnnnnnnnnnnnnnnnnnnnnnnnnnnnnnnnnnnnnnnnnnnnnnnnnnnnnnnnnnnnnnnnnnnnnnnnnnnnnnnnnnnnnnnnnnnnnnnnnnnnnnnnnnnnnnnnnnnnnnnnnnnnnnnnnnnnnnnnnnnnnnnnnnnnnnnnnnnnnnnnnnnnnnnnnnnnnnnnnnnnnnnnnnnnnnnnnnnnnnnnnnnnnnnnnnnnnnnnnnnnnnnnnnnnnnnnnnnnnnnnnnnnnnnnnnnnnnnnnnnnnnnnnnnnnnnnnnnnnnnnnnnnnnnnnnnnnnnnnnnnnnnnnnnnnnnnnnnnnnnnnnnnnnnnnnnnnnnnnnnnnnnnnnnnnnnnnnnnnnnnnnnnnnnnnnnnnnnnnnnnnnnnnnnnnnnnnnnnnnnnnnnnnnnnnnnnnnnnnnnnnnnnnnnnnnnnnnnnnnnnnnnnnnnnnnnnnnnnnnnnnnnnnnnnnnnnnnnnnnnnnnnnnnnnnnnnnnnnnnnnnnnnnnnnnnnnnnnnnnnnnnnnnnnnnnnnnnnnnnnnnnnnnnnnnnnnnnnnnnnnnnnnnnnnnnnnnnnnnnnnnnnnnnnnnnnnnnnnnnnnnnnnnnnnnnnnnnnnnnnnnnnnnnnnnnnnnnnnnnnnnnnnnnnnnnnnnnnnnnnnnnnnnnnnnnnnnnnnnnnnnnnnnnnnnnnnnnnnnnnnnnnnnnnnnnnnnnnnnnnnnnnnnnnnnnnnnnnnnnnnnnnnnnnnnnnnnnnnnnnnnnnnnnnnnnnnnnnnnnnnnnnnnnnnnnnnnnnnnnnnnnnnnnnnnnnnnnnnnnnnnnnnnnnnnnnnnnnnnnnnnnnnnnnnnnnnnnnnnnnnnnnnnnnnnnnnnnnnnnnnnnnnnnnnnnnnnnnnnnnnnnnnnnnnnnnnnnnnnnnnnnnnnnnnnnnnnnnnnnnnnnnnnnnnnnnnnnnnnnnnnnnnnnnnnnnnnnnnnnnnnnnnnnnnnnnnnnnnnnnnnnnnnnnnnnnnnnnnnnnnnnnnnnnnnnnnnnnnnnnnnnnnnnnnnnnnnnnnnnnnnnnnnnnnnnnnnnnnnnnnnnnnnnnnnnnnnnnnnnnnnnnnnnnnnnnnnnnnnnnnnnnnnnnnnnnnnnnnnnnnnnnnnnnnnnnnnnnnnnnnnnnnnnnnnnnnnnnnnnnnnnnnnnnnnnnnnnnnnnnnnnnnnnnnnnnnnnnnnnnnnnnnnnnnnnnnnnnnnnnnnnnnnnnnnnnnnnnnnnnnnnnnnnnnnnnnnnnnnnnnnnnnnnnnnnnnnnnnnnnnnnnnnnnnnnnnnnnnnnnnnnnnnnnnnnnnnnnnnnnnnnnnnnnnnnnnnnnnnnnnnnnnnnnnnnnnnnnnnnnnnnnnnnnnnnnnnnnnnnnnnnnnnnnnnnnnnnnnnnnnnnnnnnnnnnnnnnnnnnnnnnnnnnnnnnnnnnnnnnnnnnnnnnnnnnnnnnnnnnnnnnnnnnnnnnnnnnnnnnnnnnnnnnnnnnnnnnnnnnnnnnnnnnnnnnnnnnnnnnnnnnnnnnnnnnnnnnnnnnnnnnnnnnnnnnnnnnnnnnnnnnnnnnnnnnnnnnnnnnnnnnnnnnnnnnnnnnnnnnnnnnnnnnnnnnnnnnnnnnnnnnnnnnnnnnnnnnnnnnnnnnnnnnnnnnnnnnnnnnnnnnnnnnnnnnnnnnnnnnnnnnnnnnnnnnnnnnnnnnnnnnnnnnnnnnnnnnnnnnnnnnnnnnnnnnnnnnnnnnnnnnnnnnnnnnnnnnnnnnnnnnnnnnnnnnnnnnnnnnnnnnnnnnnnnnnnnnnnnnnnnnnnnnnnnnnnnnnnnnnnnnnnnnnnnnnnnnnnnnnnnnnnnnnnnnnnnnnnnnnnnnnnnnnnnnnnnnnnnnnnnnnnnnnnnnnnnnnnnnnnnnnnnnnnnnnnnnnnnnnnnnnnnnnnnnnnnnnnnnnnnnnnnnnnnnnnnnnnnnnnnnnnnnnnnnnnnnnnnnnnnnnnnnnnnnnnnnnnnnnnnnnnnnnnnnnnnnnnnnnnnnnnnnnnnnnnnnnnnnnnnnnnnnnnnnnnnnnnnnnnnnnnnnnnnnnnnnnnnnnnnnnnnnnnnnnnnnnnnnnnnnnnnnnnnnnnnnnnnnnnnnnnnnnnnnnnnnnnnnnnnnnnnnnnnnnnnnnnnnnnnnnnnnnnnnnnnnnnnnnnnnnnnnnnnnnnnnnnnnnnnnnnnnnnnnnnnnnnnnnnnnnnnnnnnnnnnnnnnnnnnnnnnnnnnnnnnnnnnnnnnnnnnnnnnnnnnnnnnnnnnnnnnnnnnnnnnnnnnnnnnnnnnnnnnnnnnnnnnnnnnnnnnnnnnnnnnnnnnnnnnnnnnnnnnnnnnnnnnnnnnnnnnnnnnnnnnnnnnnnnnnnnnnnnnnnnnnnnnnnnnnnnnnnnnnnnnnnnnnnnnnnnnnnnnnnnnnnnnnnnnnnnnnnnnnnnnnnnnnnnnnnnnnnnnnnnnnnnnnnnnnnnnnnnnnnnnnnnnnnnnnnnnnnnnnnnnnnnnnnnnnnnnnnnnnnnnnnnnnnnnnnnnnnnnnnnnnnnnnnnnnnnnnnnnnnnnnnnnnnnnnnnnnnnnnnnnnnnnnnnnnnnnnnnnnnnnnnnnnnnnnnnnnnnnnnnnnnnnnnnnnnnnnnnnnnnnnnnnnnnnnnnnnnnnnnnnnnnnnnnnnnnnnnnnnnnnnnnnnnnnnnnnnnnnnnnnnnnnnnnnnnnnnnnnnnnnnnnnnnnnnnnnnnnnnnnnnnnnnnnnnnnnnnnnnnnnnnnnnnnnnnnnnnnnnnnnnnnnnnnnnnnnnnnnnnnnnnnnnnnnnnnnnnnnnnnnnnnnnnnnnnnnnnnnnnnnnnnnnnnnnnnnnnnnnnnnnnnnnnnnnnnnnnnnnnnnnnnnnnnnnnnnnnnnnnnnnnnnnnnnnnnnnnnnnnnnnnnnnnnnnnnnnnnnnnnnnnnnnnnnnnnnnnnnnnnnnnnnnnnnnnnnnnnnnnnnnnnnnnnnnnnnnnnnnnnnnnnnnnnnnnnnnnnnnnnnnnnnnnnnnnnnnnnnnnnnnnnnnnnnnnnnnnnnnnnnnnnnnnnnnnnnnnnnnnnnnnnnnnnnnnnnnnnnnnnnnnnnnnnnnnnnnnnnnnnnnnnnnnnnnnnnnnnnnnnnnnnnnnnnnnnnnnnnnnnnnnnnnnnnnnnnnnnnnnnnnnnnnnnnnnnnnnnnnnnnnnnnnnnnnnnnnnnnnnnnnnnnnnnnnnnnnnnnnnnnnnnnnnnnnnnnnnnnnnnnnnnnnnnnnnnnnnnnnnnnnnnnnnnnnnnnnnnnnnnnnnnnnnnnnnnnnnnnnnnnnnnnnnnnnnnnnnnnnnnnnnnnnnnnnnnnnnnnnnnnnnnnnnnnnnnnnnnnnnnnnnnnnnnnnnnnnnnnnnnnnnnnnnnnnnnnnnnnnnnnnnnnnnnnnnnnnnnnnnnnnnnnnnnnnnnnnnnnnnnnnnnnnnnnnnnnnnnnnnnnnnnnnnnnnnnnnnnnnnnnnnnnnnnnnnnnnnnnnnnnnnnnnnnnnnnnnnnnnnnnnnnnnnnnnnnnnnnnnnnnnnnnnnnnnnnnnnnnnnnnnnnnnnnnnnnnnnnnnnnnnnnnnnnnnnnnnnnnnnnnnnnnnnnnnnnnnnnnnnnnnnnnnnnnnnnnnnnnnnnnnnnnnnnnnnnnnnnnnnnnnnnnnnnnnnnnnnnnnnnnnnnnnnnnnnnnnnnnnnnnnnnnnnnnnnnnnnnnnnnnnnnnnnnnnnnnnnnnnnnnnnnnnnnnnnnnnnnnnnnnnnnnnnnnnnnnnnnnnnnnnnnnnnnnnnnnnnnnnnnnnnnnnnnnnnnnnnnnnnnnnnnnnnnnnnnnnnnnnnnnnnnnnnnnnnnnnnnnnnnnnnnnnnnnnnnnnnnnnnnnnnnnnnnnnnnnnnnnnnnnnnnnnnnnnnnnnnnnnnnnnnnnnnnnnnnnnnnnnnnnnnnnnnnnnnnnnnnnnnnnnnnnnnnnnnnnnnnnnnnnnnnnnnnnnnnnnnnnnnnnnnnnnnnnnnnnnnnnnnnnnnnnnnnnnnnnnnnnnnnnnnnnnnnnnnnnnnnnnnnnnnnnnnnnnnnnnnnnnnnnnnnnnnnnnnnnnnnnnnnnnnnnnnnnnnnnnnnnnnnnnnnnnnnnnnnnnnnnnnnnnnnnnnnnnnnnnnnnnnnnnnnnnnnnnnnnnnnnnnnnnnnnnnnnnnnnnnnnnnnnnnnnnnnnnnnnnnnnnnnnnnnnnnnnnnnnnnnnnnnnnnnnnnnnnnnnnnnnnnnnnnnnnnnnnnnnnnnnnnnnnnnnnnnnnnnnnnnnnnnnnnnnnnnnnnnnnnnnnnnnnnnnnnnnnnnnnnnnnnnnnnnnnnnnnnnnnnnnnnnnnnnnnnnnnnnnnnnnnnnnnnnnnnnnnnnnnnnnnnnnnnnnnnnnnnnnnnnnnnnnnnnnnnnnnnnnnnnnnnnnnnnnnnnnnnnnnnnnnnnnnnnnnnnnnnnnnnnnnnnnnnnnnnnnnnnnnnnnnnnnnnnnnnnnnnnnnnnnnnnnnnnnnnnnnnnnnnnnnnnnnnnnnnnnnnnnnnnnnnnnnnnnnnnnnnnnnnnnnnnnnnnnnnnnnnnnnnnnnnnnnnnnnnnnnnnnnnnnnnnnnnnnnnnnnnnnnnnnnnnnnnnnnnnnnnnnnnnnnnnnnnnnnnnnnnnnnnnnnnnnnnnnnnnnnnnnnnnnnnnnnnnnnnnnnnnnnnnnnnnnnnnnnnnnnnnnnnnnnnnnnnnnnnnnnnnnnnnnnnnnnnnnnnnnnnnnnnnnnnnnnnnnnnnnnnnnnnnnnnnnnnnnnnnnnnnnnnnnnnnnnnnnnnnnnnnnnnnnnnnnnnnnnnnnnnnnnnnnnnnnnnnnnnnnnnnnnnnnnnnnnnnnnnnnnnnnnnnnnnnnnnnnnnnnnnnnnnnnnnnnnnnnnnnnnnnnnnnnnnnnnnnnnnnnnnnnnnnnnnnnnnnnnnnnnnnnnnnnnnnnnnnnnnnnnnnnnnnnnnnnnnnnnnnnnnnnnnnnnnnnnnnnnnnnnnnnnnnnnnnnnnnnnnnnnnnnnnnnnnnnnnnnnnnnnnnnnnnnnnnnnnnnnnnnnnnnnnnnnnnnnnnnnnnnnnnnnnnnnnnnnnnnnnnnnnnnnnnnnnnnnnnnnnnnnnnnnnnnnnnnnnnnnnnnnnnnnnnnnnnnnnnnnnnnnnnnnnnnnnnnnnnnnnnnnnnnnnnnnnnnnnnnnnnnnnnnnnnnnnnnnnnnnnnnnnnnnnnnnnnnnnnnnnnnnnnnnnnnnnnnnnnnnnnnnnnnnnnnnnnnnnnnnnnnnnnnnnnnnnnnnnnnnnnnnnnnnnnnnnnnnnnnnnnnnnnnnnnnnnnnnnnnnnnnnnnnnnnnnnnnnnnnnnnnnnnnnnnnnnnnnnnnnnnnnnnnnnnnnnnnnnnnnnnnnnnnnnnnnnnnnnnnnnnnnnnnnnnnnnnnnnnnnnnnnnnnnnnnnnnnnnnnnnnnnnnnnnnnnnnnnnnnnnnnnnnnnnnnnnnnnnnnnnnnnnnnnnnnnnnnnnnnnnnnnnnnnnnnnnnnnnnnnnnnnnnnnnnnnnnnnnnnnnnnnnnnnnnnnnnnnnnnnnnnnnnnnnnnnnnnnnnnnnnnnnnnnnnnnnnnnnnnnnnnnnnnnnnnnnnnnnnnnnnnnnnnnnnnnnnnnnnnnnnnnnnnnnnnnnnnnnnnnnnnnnnnnnnnnnnnnnnnnnnnnnnnnnnnnnnnnnnnnnnnnnnnnnnnnnnnnnnnnnnnnnnnnnnnnnnnnnnnnnnnnnnnnnnnnnnnnnnnnnnnnnnnnnnnnnnnnnnnnnnnnnnnnnnnnnnnnnnnnnnnnnnnnnnnnnnnnnnnnnnnnnnnnnnnnnnnnnnnnnnnnnnnnnnnnnnnnnnnnnnnnnnnnnnnnnnnnnnnnnnnnnnnnnnnnnnnnnnnnnnnnnnnnnnnnnnnnnnnnnnnnnnnnnnnnnnnnnnnnnnnnnnnnnnnnnnnnnnnnnnnnnnnnnnnnnnnnnnnnnnnnnnnnnnnnnnnnnnnnnnnnnnnnnnnnnnnnnnnnnnnnnnnnnnnnnnnnnnnnnnnnnnnnnnnnnnnnnnnnnnnnnnnnnnnnnnnnnnnnnnnnnnnnnnnnnnnnnnnnnnnnnnnnnnnnnnnnnnnnnnnnnnnnnnnnnnnnnnnnnnnnnnnnnnnnnnnnnnnnnnnnnnnnnnnnnnnnnnnnnnnnnnnnnnnnnnnnnnnnnnnnnnnnnnnnnnnnnnnnnnnnnnnnnnnnnnnnnnnnnnnnnnnnnnnnnnnnnnnnnnnnnnnnnnnnnnnnnnnnnnnnnnnnnnnnnnnnnnnnnnnnnnnnnnnnnnnnnnnnnnnnnnnnnnnnnnnnnnnnnnnnnnnnnnnnnnnnnnnnnnnnnnnnnnnnnnnnnnnnnnnnnnnnnnnnnnnnnnnnnnnnnnnnnnnnnnnnnnnnnnnnnnnnnnnnnnnnnnnnnnnnnnnnnnnnnnnnnnnnnnnnnnnnnnnnnnnnnnnnnnnnnnnnnnnnnnnnnnnnnnnnnnnnnnnnnnnnnnnnnnnnnnnnnnnnnnnnnnnnnnnnnnnnnnnnnnnnnnnnnnnnnnnnnnnnnnnnnnnnnnnnnnnnnnnnnnnnnnnnnnnnnnnnnnnnnnnnnnnnnnnnnnnnnnnnnnnnnnnnnnnnnnnnnnnnnnnnnnnnnnnnnnnnnnnnnnnnnnnnnnnnnnnnnnnnnnnnnnnnnnnnnnnnnnnnnnnnnnnnnnnnnnnnnnnnnnnnnnnnnnnnnnnnnnnnnnnnnnnnnnnnnnnnnnnnnnnnnnnnnnnnnnnnnnnnnnnnnnnnnnnnnnnnnnnnnnnnnnnnnnnnnnnnnnnnnnnnnnnnnnnnnnnnnnnnnnnnnnnnnnnnnnnnnnnnnnnnnnnnnnnnnnnnnnnnnnnnnnnnnnnnnnnnnnnnnnnnnnnnnnnnnnnnnnnnnnnnnnnnnnnnnnnnnnnnnnnnnnnnnnnnnnnnnnnnnnnnnnnnnnnnnnnnnnnnnnnnnnnnnnnnnnnnnnnnnnnnnnnnnnnnnnnnnnnnnnnnnnnnnnnnnnnnnnnnnnnnnnnnnnnnnnnnnnnnnnnnnnnnnnnnnnnnnnnnnnnnnnnnnnnnnnnnnnnnnnnnnnnnnnnnnnnnnnnnnnnnnnnnnnnnnnnnnnnnnnnnnnnnnnnnnnnnnnnnnnnnnnnnnnnnnnnnnnnnnnnnnnnnnnnnnnnnnnnnnnnnnnnnnnnnnnnnnnnnnnnnnnnnnnnnnnnnnnnnnnnnnnnnnnnnnnnnnnnnnnnnnnnnnnnnnnnnnnnnnnnnnnnnnnnnnnnnnnnnnnnnnnnnnnnnnnnnnnnnnnnnnnnnnnnnnnnnnnnnnnnnnnnnnnnnnnnnnnnnnnnnnnnnnnnnnnnnnnnnnnnnnnnnnnnnnnnnnnnnnnnnnnnnnnnnnnnnnnnnnnnnnnnnnnnnnnnnnnnnnnnnnnnnnnnnnnnnnnnnnnnnnnnnnnnnnnnnnnnnnnnnnnnnnnnnnnnnnnnnnnnnnnnnnnnnnnnnnnnnnnnnnnnnnnnnnnnnnnnnnnnnnnnnnnnnnnnnnnnnnnnnnnnnnnnnnnnnnnnnnnnnnnnnnnnnnnnnnnnnnnnnnnnnnnnnnnnnnnnnnnnnnnnnnnnnnnnnnnnnnnnnnnnnnnnnnnnnnnnnnnnnnnnnnnnnnnnnnnnnnnnnnnnnnnnnnnnnnnnnnnnnnnnnnnnnnnnnnnnnnnnnnnnnnnnnnnnnnnnnnnnnnnnnnnnnnnnnnnnnnnnnnnnnnnnnnnnnnnnnnnnnnnnnnnnnnnnnnnnnnnnnnnnnnnnnnnnnnnnnnnnnnnnnnnnnnnnnnnnnnnnnnnnnnnnnnnnnnnnnnnnnnnnnnnnnnnnnnnnnnnnnnnnnnnnnnnnnnnnnnnnnnnnnnnnnnnnnnnnnnnnnnnnnnnnnnnnnnnnnnnnnnnnnnnnnnnnnnnnnnnnnnnnnnnnnnnnnnnnnnnnnnnnnnnnnnnnnnnnnnnnnnnnnnnnnnnnnnnnnnnnnnnnnnnnnnnnnnnnnnnnnnnnnnnnnnnnnnnnnnnnnnnnnnnnnnnnnnnnnnnnnnnnnnnnnnnnnnnnnnnnnnnnnnnnnnnnnnnnnnnnnnnnnnnnnnnnnnnnnnnnnnnnnnnnnnnnnnnnnnnnnnnnnnnnnnnnnnnnnnnnnnnnnnnnnnnnnnnnnnnnnnnnnnnnnnnnnnnnnnnnnnnnnnnnnnnnnnnnnnnnnnnnnnnnnnnnnnnnnnnnnnnnnnnnnnnnnnnnnnnnnnnnnnnnnnnnnnnnnnnnnnnnnnnnnnnnnnnnnnnnnnnnnnnnnnnnnnnnnnnnnnnnnnnnnnnnnnnnnnnnnnnnnnnnnnnnnnnnnnnnnnnnnnnnnnnnnnnnnnnnnnnnnnnnnnnnnnnnnnnnnnnnnnnnnnnnnnnnnnnnnnnnnnnnnnnnnnnnnnnnnnnnnnnnnnnnnnnnnnnnnnnnnnnnnnnnnnnnnnnnnnnnnnnnnnnnnnnnnnnnnnnnnnnnnnnnnnnnnnnnnnnnnnnnnnnnnnnnnnnnnnnnnnnnnnnnnnnnnnnnnnnnnnnnnnnnnnnnnnnnnnnnnnnnnnnnnnnnnnnnnnnnnnnnnnnnnnnnnnnnnnnnnnnnnnnnnnnnnnnnnnnnnnnnnnnnnnnnnnnnnnnnnnnnnnnnnnnnnnnnnnnnnnnnnnnnnnnnnnnnnnnnnnnnnnnnnnnnnnnnnnnnnnnnnnnnnnnnnnnnnnnnnnnnnnnnnnnnnnnnnnnnnnnnnnnnnnnnnnnnnnnnnnnnnnnnnnnnnnnnnnnnnnnnnnnnnnnnnnnnnnnnnnnnnnnnnnnnnnnnnnnnnnnnnnnnnnnnnnnnnnnnnnnnnnnnnnnnnnnnnnnnnnnnnnnnnnnnnnnnnnnnnnnnnnnnnnnnnnnnnnnnnnnnnnnnnnnnnnnnnnnnnnnnnnnnnnnnnnnnnnnnnnnnnnnnnnnnnnnnnnnnnnnnnnnnnnnnnnnnnnnnnnnnnnnnnnnnnnnnnnnnnnnnnnnnnnnnnnnnnnnnnnnnnnnnnnnnnnnnnnnnnnnnnnnnnnnnnnnnnnnnnnnnnnnnnnnnnnnnnnnnnnnnnnnnnnnnnnnnnnnnnnnnnnnnnnnnnnnnnnnnnnnnnnnnnnnnnnnnnnnnnnnnnnnnnnnnnnnnnnnnnnnnnnnnnnnnnnnnnnnnnnnnnnnnnnnnnnnnnnnnnnnnnnnnnnnnnnnnnnnnnnnnnnnnnnnnnnnnnnnnnnnnnnnnnnnnnnnnnnnnnnnnnnnnnnnnnnnnnnnnnnnnnnnnnnnnnnnnnnnnnnnnnnnnnnnnnnnnnnnnnnnnnnnnnnnnnnnnnnnnnnnnnnnnnnnnnnnnnnnnnnnnnnnnnnnnnnnnnnnnnnnnnnnnnnnnnnnnnnnnnnnnnnnnnnnnnnnnnnnnnnnnnnnnnnnnnnnnnnnnnnnnnnnnnnnnnnnnnnnnnnnnnnnnnnnnnnnnnnnnnnnnnnnnnnnnnnnnnnnnnnnnnnnnnnnnnnnnnnnnnnnnnnnnnnnnnnnnnnnnnnnnnnnnnnnnnnnnnnnnnnnnnnnnnnnnnnnnnnnnnnnnnnnnnnnnnnnnnnnnnnnnnnnnnnnnnnnnnnnnnnnnnnnnnnnnnnnnnnnnnnnnnnnnnnnnnnnnnnnnnnnnnnnnnnnnnnnnnnnnnnnnnnnnnnnnnnnnnnnnnnnnnnnnnnnnnnnnnnnnnnnnnnnnnnnnnnnnnnnnnnnnnnnnnnnnnnnnnnnnnnnnnnnnnnnnnnnnnnnnnnnnnnnnnnnnnnnnnnnnnnnnnnnnnnnnnnnnnnnnnnnnnnnnnnnnnnnnnnnnnnnnnnnnnnnnnnnnnnnnnnnnnnnnnnnnnnnnnnnnnnnnnnnnnnnnnnnnnnnnnnnnnnnnnnnnnnnnnnnnnnnnnnnnnnnnnnnnnnnnnnnnnnnnnnnnnnnnnnnnnnnnnnnnnnnnnnnnnnnnnnnnnnnnnnnnnnnnnnnnnnnnnnnnnnnnnnnnnnnnnnnnnnnnnnnnnnnnnnnnnnnnnnnnnnnnnnnnnnnnnnnnnnnnnnnnnnnnnnnnnnnnnnnnnnnnnnnnnnnnnnnnnnnnnnnnnnnnnnnnnnnnnnnnnnnnnnnnnnnnnnnnnnnnnnnnnnnnnnnnnnnnnnnnnnnnnnnnnnnnnnnnnnnnnnnnnnnnnnnnnnnnnnnnnnnnnnnnnnnnnnnnnnnnnnnnnnnnnnnnnnnnnnnnnnnnnnnnnnnnnnnnnnnnnnnnnnnnnnnnnnnnnnnnnnnnnnnnnnnnnnnnnnnnnnnnnnnnnnnnnnnnnnnnnnnnnnnnnnnnnnnnnnnnnnnnnnnnnnnnnnnnnnnnnnnnnnnnnnnnnnnnnnnnnnnnnnnnnnnnnnnnnnnnnnnnnnnnnnnnnnnnnnnnnnnnnnnnnnnnnnnnnnnnnnnnnnnnnnnnnnnnnnnnnnnnnnnnnnnnnnnnnnnnnnnnnnnnnnnnnnnnnnnnnnnnnnnnnnnnnnnnnnnnnnnnnnnnnnnnnnnnnnnnnnnnnnnnnnnnnnnnnnnnnnnnnnnnnnnnnnnnnnnnnnnnnnnnnnnnnnnnnnnnnnnnnnnnnnnnnnnnnnnnnnnnnnnnnnnnnnnnnnnnnnnnnnnnnnnnnnnnnnnnnnnnnnnnnnnnnnnnnnnnnnnnnnnnnnnnnnnnnnnnnnnnnnnnnnnnnnnnnnnnnnnnnnnnnnnnnnnnnnnnnnnnnnnnnnnnnnnnnnnnnnnnnnnnnnnnnnnnnnnnnnnnnnnnnnnnnnnnnnnnnnnnnnnnnnnnnnnnnnnnnnnnnnnnnnnnnnnnnnnnnnnnnnnnnnnnnnnnnnnnnnnnnnnnnnnnnnnnnnnnnnnnnnnnnnnnnnnnnnnnnnnnnnnnnnnnnnnnnnnnnnnnnnnnnnnnnnnnnnnnnnnnnnnnnnnnnnnnnnnnnnnnnnnnnnnnnnnnnnnnnnnnnnnnnnnnnnnnnnnnnnnnnnnnnnnnnnnnnnnnnnnnnnnnnnnnnnnnnnnnnnnnnnnnnnnnnnnnnnnnnnnnnnnnnnnnnnnnnnnnnnnnnnnnnnnnnnnnnnnnnnnnnnnnnnnnnnnnnnnnnnnnnnnnnnnnnnnnnnnnnnnnnnnnnnnnnnnnnnnnnnnnnnnnnnnnnnnnnnnnnnnnnnnnnnnnnnnnnnnnnnnnnnnnnnnnnnnnnnnnnnnnnnnnnnnnnnnnnnnnnnnnnnnnnnnnnnnnnnnnnnnnnnnnnnnnnnnnnnnnnnnnnnnnnnnnnnnnnnnnnnnnnnnnnnnnnnnnnnnnnnnnnnnnnnnnnnnnnnnnnnnnnnnnnnnnnnnnnnnnnnnnnnnnnnnnnnnnnnnnnnnnnnnnnnnnnnnnnnnnnnnnnnnnnnnnnnnnnnnnnnnnnnnnnnnnnnnnnnnnnnnnnnnnnnnnnnnnnnnnnnnnnnnnnnnnnnnnnnnnnnnnnnnnnnnnnnnnnnnnnnnnnnnnnnnnnnnnnnnnnnnnnnnnnnnnnnnnnnnnnnnnnnnnnnnnnnnnnnnnnnnnnnnnnnnnnnnnnnnnnnnnnnnnnnnnnnnnnnnnnnnnnnnnnnnnnnnnnnnnnnnnnnnnnnnnnnnnnnnnnnnnnnnnnnnnnnnnnnnnnnnnnnnnnnnnnnnnnnnnnnnnnnnnnnnnnnnnnnnnnnnnnnnnnnnnnnnnnnnnnnnnnnnnnnnnnnnnnnnnnnnnnnnnnnnnnnnnnnnnnnnnnnnnnnnnnnnnnnnnnnnnnnnnnnnnnnnnnnnnnnnnnnnnnnnnnnnnnnnnnnnnnnnnnnnnnnnnnnnnnnnnnnnnnnnnnnnnnnnnnnnnnnnnnnnnnnnnnnnnnnnnnnnnnnnnnnnnnnnnnnnnnnnnnnnnnnnnnnnnnnnnnnnnnnnnnnnnnnnnnnnnnnnnnnnnnnnnnnnnnnnnnnnnnnnnnnnnnnnnnnnnnnnnnnnnnnnnnnnnnnnnnnnnnnnnnnnnnnnnnnnnnnnnnnnnnnnnnnnnnnnnnnnnnnnnnnnnnnnnnnnnnnnnnnnnnnnnnnnnnnnnnnnnnnnnnnnnnnnnnnnnnnnnnnnnnnnnnnnnnnnnnnnnnnnnnnnnnnnnnnnnnnnnnnnnnnnnnnnnnnnnnnnnnnnnnnnnnnnnnnnnnnnnnnnnnnnnnnnnnnnnnnnnnnnnnnnnnnnnnnnnnnnnnnnnnnnnnnnnnnnnnnnnnnnnnnnnnnnnnnnnnnnnnnnnnnnnnnnnnnnnnnnnnnnnnnnnnnnnnnnnnnnnnnnnnnnnnnnnnnnnnnnnnnnnnnnnnnnnnnnnnnnnnnnnnnnnnnnnnnnnnnnnnnnnnnnnnnnnnnnnnnnnnnnnnnnnnnnnnnnnnnnnnnnnnnnnnnnnnnnnnnnnnnnnnnnnnnnnnnnnnnnnnnnnnnnnnnnnnnnnnnnnnnnnnnnnnnnnnnnnnnnnnnnnnnnnnnnnnnnnnnnnnnnnnnnnnnnnnnnnnnnnnnnnnnnnnnnnnnnnnnnnnnnnnnnnnnnnnnnnnnnnnnnnnnnnnnnnnnnnnnnnnnnnnnnnnnnnnnnnnnnnnnnnnnnnnnnnnnnnnnnnnnnnnnnnnnnnnnnnnnnnnnnnnnnnnnnnnnnnnnnnnnnnnnnnnnnnnnnnnnnnnnnnnnnnnnnnnnnnnnnnnnnnnnnnnnnnnnnnnnnnnnnnnnnnnnnnnnnnnnnnnnnnnnnnnnnnnnnnnnnnnnnnnnnnnnnnnnnnnnnnnnnnnnnnnnnnnnnnnnnnnnnnnnnnnnnnnnnnnnnnnnnnnnnnnnnnnnnnnnnnnnnnnnnnnnnnnnnnnnnnnnnnnnnnnnnnnnnnnnnnnnnnnnnnnnnnnnnnnnnnnnnnnnnnnnnnnnnnnnnnnnnnnnnnnnnnnnnnnnnnnnnnnnnnnnnnnnnnnnnnnnnnnnnnnnnnnnnnnnnnnnnnnnnnnnnnnnnnnnnnnnnnnnnnnnnnnnnnnnnnnnnnnnnnnnnnnnnnnnnnnnnnnnnnnnnnnnnnnnnnnnnnnnnnnnnnnnnnnnnnnnnnnnnnnnnnnnnnnnnnnnnnnnnnnnnnnnnnnnnnnnnnnnnnnnnnnnnnnnnnnnnnnnnnnnnnnnnnnnnnnnnnnnnnnnnnnnnnnnnnnnnnnnnnnnnnnnnnnnnnnnnnnnnnnnnnnnnnnnnnnnnnnnnnnnnnnnnnnnnnnnnnnnnnnnnnnnnnnnnnnnnnnnnnnnnnnnnnnnnnnnnnnnnnnnnnnnnnnnnnnnnnnnnnnnnnnnnnnnnnnnnnnnnnnnnnnnnnnnnnnnnnnnnnnnnnnnnnnnnnnnnnnnnnnnnnnnnnnnnnnnnnnnnnnnnnnnnnnnnnnnnnnnnnnnnnnnnnnnnnnnnnnnnnnnnnnnnnnnnnnnnnnnnnnnnnnnnnnnnnnnnnnnnnnnnnnnnnnnnnnnnnnnnnnnnnnnnnnnnnnnnnnnnnnnnnnnnnnnnnnnnnnnnnnnnnnnnnnnnnnnnnnnnnnnnnnnnnnnnnnnnnnnnnnnnnnnnnnnnnnnnnnnnnnnnnnnnnnnnnnnnnnnnnnnnnnnnnnnnnnnnnnnnnnnnnnnnnnnnnnnnnnnnnnnnnnnnnnnnnnnnnnnnnnnnnnnnnnnnnnnnnnnnnnnnnnnnnnnnnnnnnnnnnnnnnnnnnnnnnnnnnnnnnnnnnnnnnnnnnnnnnnnnnnnnnnnnnnnnnnnnnnnnnnnnnnnnnnnnnnnnnnnnnnnnnnnnnnnnnnnnnnnnnnnnnnnnnnnnnnnnnnnnnnnnnnnnnnnnnnnnnnnnnnnnnnnnnnnnnnnnnnnnnnnnnnnnnnnnnnnnnnnnnnnnnnnnnnnnnnnnnnnnnnnnnnnnnnnnnnnnnnnnnnnnnnnnnnnnnnnnnnnnnnnnnnnnnnnnnnnnnnnnnnnnnnnnnnnnnnnnnnnnnnnnnnnnnnnnnnnnnnnnnnnnnnnnnnnnnnnnnnnnnnnnnnnnnnnnnnnnnnnnnnnnnnnnnnnnnnnnnnnnnnnnnnnnnnnnnnnnnnnnnnnnnnnnnnnnnnnnnnnnnnnnnnnnnnnnnnnnnnnnnnnnnnnnnnnnnnnnnnnnnnnnnnnnnnnnnnnnnnnnnnnnnnnnnnnnnnnnnnnnnnnnnnnnnnnnnnnnnnnnnnnnnnnnnnnnnnnnnnnnnnnnnnnnnnnnnnnnnnnnnnnnnnnnnnnnnnnnnnnnnnnnnnnnnnnnnnnnnnnnnnnnnnnnnnnnnnnnnnnnnnnnnnnnnnnnnnnnnnnnnnnnnnnnnnnnnnnnnnnnnnnnnnnnnnnnnnnnnnnnnnnnnnnnnnnnnnnnnnnnnnnnnnnnnnnnnnnnnnnnnnnnnnnnnnnnnnnnnnnnnnnnnnnnnnnnnnnnnnnnnnnnnnnnnnnnnnnnnnnnnnnnnnnnnnnnnnnnnnnnnnnnnnnnnnnnnnnnnnnnnnnnnnnnnnnnnnnnnnnnnnnnnnnnnnnnnnnnnnnnnnnnnnnnnnnnnnnnnnnnnnnnnnnnnnnnnnnnnnnnnnnnnnnnnnnnnnnnnnnnnnnnnnnnnnnnnnnnnnnnnnnnnnnnnnnnnnnnnnnnnnnnnnnnnnnnnnnnnnnnnnnnnnnnnnnnnnnnnnnnnnnnnnnnnnnnnnnnnnnnnnnnnnnnnnnnnnnnnnnnnnnnnnnnnnnnnnnnnnnnnnnnnnnnnnnnnnnnnnnnnnnnnnnnnnnnnnnnnnnnnnnnnnnnnnnnnnnnnnnnnnnnnnnnnnnnnnnnnnnnnnnnnnnnnnnnnnnnnnnnnnnnnnnnnnnnnnnnnnnnnnnnnnnnnnnnnnnnnnnnnnnnnnnnnnnnnnnnnnnnnnnnnnnnnnnnnnnnnnnnnnnnnnnntgaaatggaatggaatggaagggaatggaatgaaccgcagtggaaaggaattgaatggaatgcaatgcaatggaatggaagggaatggaatcaccccgagtggaatggaacggaacggaatggaacagaatggaatggaatggaatggaatggaatggatggaatggaatcaaatcgagtggaatggaatggaatataatggaatggaacggaatggaatggaatcaatccgagtggaatggaatggaatggaatggactggaatggaatggatggaatggaatcaacacgagtggaatgtaatgtaatggaatggaagggaatggaatttaatgcaataaacccgaatgtaaccaaatggaatggaatggaatggaatggaatggaatggaatggaatggaatggaatggaatggaatcaacccgagtggaatgtgatgtaacgtaatgtagtggaatgcaatggaatggaatggaatggaatggaatggaattgaatggaatggaatggaatcaacccgagtggaatggaatggagtgcagtggaatggattggaaaggattggaatggattcgaatataatggaatggaatgcaatcaaaccgagtggaatgatatggaatggaatggaatggagtggaatggaatggaatggaatggatttaacccgagtggaattgaatggaatggattggaatgcaatgcaatggaatggaatggaatggattcaactcgagtggaatggaatggaatgcaatggaatggattggaatggaatcaacccgaggggaatggaatggaatggaatggaatggaatggaatggaatggaatcaacccgagtggaatgcaatggaatggaatgcagtggaatggaatgcactggaatggaatgcagtggaatggaatcaatgggattggaatggaatgaaatggaatctaaccgaatggaatgatatggaacagaatgaaatggaatcgaatggatcggaatggaatggaattaacgcgagtggaatgcaatggaacggaatggaatgcaatggaatggaatggaatggaatcaacccgagtggaatagaatggaacggaatacaatggaatggcatggaatggaatggaatggaataaacccaaatggaatgtaatgcaatggaatggaatggaatggaatggaatggaatggaatggaatggaatgcaatagaatcaacctgagtggaatggaatggaatggaatggaatggaatggaatggaatggaatggaatggaatggaatggtgggatggaatggaatcaccccgagtggaatgtaatggaatggaatggaatagaatgcaatgggatgtaatgaatccgagtggaatggaatggaatggaatggaatggaatggaatggaatggaatggaatggaatggagtcaacccaattggaacggaattgaatggaatgaaatcgaatggtatggaatggaatgaaatggattcaacccgagtgtcatggaatgaaatgcaatggaatggaatggaatggaatggaatggaatggaatggactggactggaatggaatggaaagtaatgcaaaggaacggaatcatgccgagaggaatgcaaaggaatggaatggaatggaatggaatggaatggaatggaatggaatccaccccagtcgaatggaatggaatgtaatggaatggtttggaatggaatggaatggaatggaatagaatggaaagaaccagagtggtatgcagtggaatggaatggaatggaaaggcatggatggaatggaatcaacccgagtggaatgtaatgtaatgtaacggaatggaatggaatggaagggaagggaatcaaccctagtggaacggaatggaatgaaatggaatggagtggaatggattggaatggaatggaatggaatggaatggtatcaaccctagtgaaatgaaatggaatagaatgaaatggaatggaatggattggaaaggaatcaacccatatggaatggaatggaatggaatggaatggaatggaatggaatggaatggaatggaaaagaatggagtggaatcaacccgnnnnnnnnnnnnnnnnnnnnnnnnnnnnnnnnnnnnnnnnnnnnnnnnnnnnnnnnnnnnnnnnnnnnnnnnnnnnnnnnnnnnnnnnnnnnnnnnnnnnnnnnnnnnnnnnnnnnnnnnnnnnnnnnnnnnnnnnnnnnnnnnnnnnnnnnnnnnnnnnnnnnnnnnnnnnnnnnnnnnnnnnnnnnnnnnnnnnnnnnnnnnnnnnnnnnnnnnnnnnnnnnnnnnnnnnnnnnnnnnnnnnnnnnnnnnnnnnnnnnnnnnnnnnnnnnnnnnnnnnnnnnnnnnnnnnnnnnnnnnnnnnnnnnnnnnnnnnnnnnnnnnnnnnnnnnnnnnnnnnnnnnnnnnnnnnnnnnnnnnnnnnnnnnnnnnnnnnnnnnnnnnnnnnnnnnnnnnnnnnnnnnnnnnnnnnnnnnnnnnnnnnnnnnnnnnnnnnnnnnnnnnnnnnnnnnnnnnnnnnnnnnnnnnnnnnnnnnnnnnnnnnnnnnnnnnnnnnnnnnnnnnnnnnnnnnnnnnnnnnnnnnnnnnnnnnnnnnnnnnnnnnnnnnnnnnnnnnnnnnnnnnnnnnnnnnnnnnnnnnnnnnnnnnnnnnnnnnnnnnnnnnnnnnnnnnnnnnnnnnnnnnnnnnnnnnnnnnnnnnnnnnnnnnnnnnnnnnnnnnnnnnnnnnnnnnnnnnnnnnnnnnnnnnnnnnnnnnnnnnnnnnnnnnnnnnnnnnnnnnnnnnnnnnnnnnnnnnnnnnnnnnnnnnnnnnnnnnnnnnnnnnnnnnnnnnnnnnnnnnnnnnnnnnnnnnnnnnnnnnnnnnnnnnnnnnnnnnnnnnnnnnnnnnnnnnnnnnnnnnnnnnnnnnnnnnnnnnnnnnnnnnnnnnnnnnnnnnnnnnnnnnnnnnnnnnnnnnnnnnnnnnnnnnnnnnnnnnnnnnnnnnnnnnnnnnnnnnnnnnnnnnnnnnnnnnnnnnnnnnnnnnnnnnnnnnnnnnnnnnnnnnnnnnnnnnnnnnnnnnnnnnnnnnnnnnnnnnnnnnnnnnnnnnnnnnnnnnnnnnnnnnnnnnnnnnnnnnnnnnnnnnnnnnnnnnnnnnnnnnnnnnnnnnnnnnnnnnnnnnnnnnnnnnnnnnnnnnnnnnnnnnnnnnnnnnnnnnnnnnnnnnnnnnnnnnnnnnnnnnnnnnnnnnnnnnnnnnnnnnnnnnnnnnnnnnnnnnnnnnnnnnnnnnnnnnnnnnnnnnnnnnnnnnnnnnnnnnnnnnnnnnnnnnnnnnnnnnnnnnnnnnnnnnnnnnnnnnnnnnnnnnnnnnnnnnnnnnnnnnnnnnnnnnnnnnnnnnnnnnnnnnnnnnnnnnnnnnnnnnnnnnnnnnnnnnnnnnnnnnnnnnnnnnnnnnnnnnnnnnnnnnnnnnnnnnnnnnnnnnnnnnnnnnnnnnnnnnnnnnnnnnnnnnnnnnnnnnnnnnnnnnnnnnnnnnnnnnnnnnnnnnnnnnnnnnnnnnnnnnnnnnnnnnnnnnnnnnnnnnnnnnnnnnnnnnnnnnnnnnnnnnnnnnnnnnnnnnnnnnnnnnnnnnnnnnnnnnnnnnnnnnnnnnnnnnnnnnnnnnnnnnnnnnnnnnnnnnnnnnnnnnnnnnnnnnnnnnnnnnnnnnnnnnnnnnnnnnnnnnnnnnnnnnnnnnnnnnnnnnnnnnnnnnnnnnnnnnnnnnnnnnnnnnnnnnnnnnnnnnnnnnnnnnnnnnnnnnnnnnnnnnnnnnnnnnnnnnnnnnnnnnnnnnnnnnnnnnnnnnnnnnnnnnnnnnnnnnnnnnnnnnnnnnnnnnnnnnnnnnnnnnnnnnnnnnnnnnnnnnnnnnnnnnnnnnnnnnnnnnnnnnnnnnnnnnnnnnnnnnnnnnnnnnnnnnnnnnnnnnnnnnnnnnnnnnnnnnnnnnnnnnnnnnnnnnnnnnnnnnnnnnnnnnnnnnnnnnnnnnnnnnnnnnnnnnnnnnnnnnnnnnnnnnnnnnnnnnnnnnnnnnnnnnnnnnnnnnnnnnnnnnnnnnnnnnnnnnnnnnnnnnnnnnnnnnnnnnnnnnnnnnnnnnnnnnnnnnnnnnnnnnnnnnnnnnnnnnnnnnnnnnnnnnnnnnnnnnnnnnnnnnnnnnnnnnnnnnnnnnnnnnnnnnnnnnnnnnnnnnnnnnnnnnnnnnnnnnnnnnnnnnnnnnnnnnnnnnnnnnnnnnnnnnnnnnnnnnnnnnnnnnnnnnnnnnnnnnnnnnnnnnnnnnnnnnnnnnnnnnnnnnnnnnnnnnnnnnnnnnnnnnnnnnnnnnnnnnnnnnnnnnnnnnnnnnnnnnnnnnnnnnnnnnnnnnnnnnnnnnnnnnnnnnnnnnnnnnnnnnnnnnnnnnnnnnnnnnnnnnnnnnnnnnnnnnnnnnnnnnnnnnnnnnnnnnnnnnnnnnnnnnnnnnnnnnnnnnnnnnnnnnnnnnnnnnnnnnnnnnnnnnnnnnnnnnnnnnnnnnnnnnnnnnnnnnnnnnnnnnnnnnnnnnnnnnnnnnnnnnnnnnnnactcaagtggaatagaatgggtttaatggaatggactctaatggaatggaatgcaatggactcgaatggaatgaaatgaaacggactcgaatgaaatggaatggaattgaatggaattgattggaatggattggaatggaaaagacttgaatggaacagaatggaatggaccctaacagaatggaatggattggaatgggatcgaatggaatggaatggaatggaatggattcaaatagaattgcacggaatggaatctaatggaatgtatcaaatggaatggaattgaatggaatagaattgaatggaacagaatggaatgaaatggactcgcatgtaatgcagttgaattgaattgactcgaaaggaaagaaatcgaatggattcgaatggaacgaaatggattggaatggaatggaatggacatgaatggaatggaatggtatggacttcaatggaacggaatggactcgaatgaaatggagtggaatggagtcaactcgagtggaatggagtggaacggaatggactcgaatgaaacggagtgcaattgaatggacttcaatggagtggaatggaatggactcgagtggaatggaagggacacgaatggcatggaatggaatggacctcaatgaaatggaatggaatggacccgaatggattggaatggaatggaatggaatggaaaggaatgcaatggacatgaatggaatggaatggaatggaatggaattgactcgaatgaaattgaatggaatggaatggaatggacttgagtggaatggaagtgacacgaatggcatggaatggaatggacctcaatgaaatggaatggaatggacccgaatggaatggaatggaacgcaatggaaaggaatggaatggacacgaatggaatggaatgcaatgcaacggaacggattggaatggtatggactccaatggaatggaatggaatggaatggaatggaatggactcaaatggaatggaatgcaatggaatggaatcgaatggaaaagaaatgaatggattggactcgaatgaattcgaatggattggactagaatgaaatggtatggaatggattcaaaatgaatggaatggaatggaatggactcgaatggtatggaatggaagggaaatgactcgagtacaatggagtggattcgaatggaatggaatggactcgaatggaatggaatggagtggaatggaaccgaatggaatgggatggaatggaatggaaaggaatggaaatgaatcgaatagaatggaatggaatggacccgaatggagagggaatgaatggaatggactcgaatggaaagaatggaatggaatagaatggaatgcagtggtatggaatggaatggacttgaatggagtagtatggatggaaaggaaaggacttaaaaggattggaatggaatggactcgaatggaatacaatggatacgaatggaatggaatggaatgcaatggaatggaatagaatggaatggaatgatatggaatggaatggacttgaatggaatagaatggagtggaaaggaatggacttaaaaggattgcaatggaatggactcaaatggaataaaatggatataaatggaatggaatggaatggaaaggaacagacttgaatggagtagaatgtgatttaatggaatttattgtaaaaaaaacgaatggaacggactcgaatggaatgcaatagaatggactcgaatggaatggaatgcaaaggaatggactggaatggaatggaatggaattgaatagacttgaatggaaaagagtggaattgaactgaaagaaatgcatttgaatggaatggacacgaatggaacgaaatggaatggaaaggaatggtctcgaatagaatggaatagaatggaatggaatggactcgaatataatggaatggtatggaatggactcaaatgaattggaatggaatggactctattggaatggaatggaactgaatgtactcaaatggaatggaggaatggaattgaatgtactcatatggaatggagtaattgaattgactcgtatgaaatggaatggaatggactcgaacggaatggactggacaggaatggaatggaacggaatggaaaggacttaaatttaatagaatggagtggattctaatggaatggaatgcaatggaattgattcgaatggattggaaaggaatggactcgaatgtaatggaatggattgaaatggagtcgaaagggatgggatggaataaactctataggaatggaatggagtggaatggactcgaatgtaatggaatggaaatcacgcaaatagaattgaattgagtctaatggattgaagttaaacggaatggaacggaatggaatggactcgaatggaatggaatgaaattaacacgaatgcaatggaatggaatggaaagaaatggtctcgattggaatggaagggaatggaatggacctgaattgagtggaatggaatggaacggacccgaggggaatggaattgaatgggcccgaatggaatggtatcgaatggaagggcaaggactggaatttaatggagtggaatggtatggaatggaatggactctaatgaaatagaatagaatggaatggaatggaatcaaaattaatggaatggattggactcaaacggaatggaatggaaatgaatggaatggaatggaatggaccagaatggaatgcaatggaatggaatggaatggaatggcctcgaatggaatgtagttgtattgaagggatccgaaaggaatggaatggaatggaatggactcgtatagaatgaaatggaatgcaatggaatcgaatgaaatggaatggactcaaatggaatgtaatgcaatagaatcgactcgagtcgaatggaatggagtgcaacggaatggacactaatggaattgaaaggaatggaaaatacttgagtggaatgtaatggaagggaatggactcaaatggaatggaatggtgtttaaaggaatggactataatggactggaatgcaatggactcgaaaggaatgcagtggtatgaactcaaaagaaacggaatggaatggaatggactcgaatgcactggacccaaattgaatggcatgtaatgtaatggaatgggatgcaatggactggactggaatggaatggaatggaacggacttgaatggaatagaatgtaatggaatggaaaggtcatcaagtctaaagaatggaatggactccaatggaaaacaatggactcgaatggaatggaatggaatggaatttattgtaatggattcttacagaatggaaactaatggaatggaaaggaatggactcgaatggaatagagtggaagggactctaatggaatggaatgcaatggaatggaatggaatggaatggaatggaatggaatggaatggaatggaatcgaatggaatagaatggacttgaatgatcttgataggaatgaaatttaattgaatggaatggacccaaaagaaatttaatgcaatgaaatggactcgaatggaatggaatggagtgaagtggacttgaaaggaaaggaatggaatggaatgaactcgcatggaatggaattgaacgggctcgacaggaatgggttggaatggaatggacacaaatggaatggaatgcaaaggactgaaatggaatagaatggaatgcaatggactcaaatggaatggaatgcaaaggactgaaatggaatggaaccgactcatatggattgaatggaatggactcgaatggactggacatgaatggaatagaatagaatggaatggagtcaaatgtaatagaatggaatggaacggaatgcaatggacttgcattgtatgcaattgaattgaattgagtcgacaggaataaaattgaatggaatggaaaggaatggaatggaaaggacacgaatggaatggaatagaatggactcgaatgtaatggaatggactcgaatggaatggaatcgactcgagtggaatggagtggaatgtaatggactcaaatgaaatggaacataaccgaatggaatcgaatggagtggcatggaatggaatggaaatgaatggaatggaagggacacgaatgccatggaaaggattggacccgaatggaatggaatggaatggaatggaatggaatggaatggaaagtaacggaatggaatcgaatggaatggaatggaatggaaaagaatagacacgaatggaatggaatggaatagaatggaatgcaattgaatggaatggaatggaatgaactcgagtgcaatggaatggaatggaatagattggaaccgaatggaatgggatggaatggactcgaatggaatggaatggaatggagtcgaatggaatagaacaaaatgggttggactcgaatgtaatggaatggaatgtactcgaattaaatggaatcgaaaggaatggacttgaaaggtatgtaatggaacggaaacgactcgagtgcaatggaatggactcgaaatgtatgtaatggaatggaaaagactcgagtgcaatggagttgacttgaatggaatacaatgtaatggactcgaatggaatggaattgaaatgacacgaacggaacggaatgcaatagacatttaaggacacgaacggaatagaatggagtggaatggacccggatggaagggaatggaaatgaatggactcgaatggaatggaatgcaatggaatggacccgaatggaatggaatggaatggaatggaatggaatggtatggaatggaatggacttcaatggaatcgaatggaaaagaatggaatggacgagaaaggaatggaatggaatggactctaaaggaatagaatggatacgatttgaatggaatggaatggaacggatttgaatggaatagaatgggatttaatggaatggactctaaaggaatggaattgaatggacttgaatggaatgaaatggaatggactcgaatggaatggaatggaatgcaatggacttcattggaatggaatggaatagaatggaatggaatggaatggaatggaatggaatggaatggaatggaatggaatggaaccgaacggaatggaatggagtggaatggaatggaatggaatggattttaatgtaatggaatggaatggagtggacttgaatggaatacagtggaatataatggaatggaatggaatggaatggaatggaatggaattgacttgattggaatcgaacggaatggagtggactggaatggaatacaatggaaatgaaaggaatggactcgaaggcaatggaatggaatggactcaaatggaacagaattgtctcaaatagaatggaatggaattaaatcagtcaattataatcgaaaggaatctaatggaatgcaaagaatggactcgaatggaatagaatggaagagaatggaatggactcgaatgtaatggaatgcaaaggaatggactagaatggaatgaaatgcaacggattcgaatggaaagaaatcaaattgaatggtctcgaaagaatagaatggaatgcaatggaatggacacgaatggaatggaatggaataaaatggaattgaatggaatggaaccgaaaggaatagattggaatggaatggacgcaaatggaaaggaatggagtggaatggactcgaatagaatggagtggaatggaatggactcaaatggaatggattggactcgaatggaatggaaatgaatggattggactctaattaaatagaatagaattgaatgtaatggactcgaatggaatggaaaggaatggactcaaatgaaatggaatggactcgaatggaatggagtggaatggaatggacctgaatgaaatggaatggagtggaatggaacggaatgcactcgaatagaatggaatggaatgaacccgaatggaattgaatggaatggaaaggattggactcgaatggaatggaaggcaatggaatgaaccagaacggaatggaatggaatggaatggaatggaatggaatggaatggaaaggaatggacgtgaaaggaatgaaaaggaaaggaatggaccccaacggagtggaatggaatttaattgactcgaatgaaatggaatagaattgacacatatagaacggaatcgaatggaatggaaaggaattggatggaatggaatggaaaggaatgaaatgaaatagtaaggtctggaaagaaatggacttagatggaatagaatagaacggaatggaatcgaaaggaatggaatggaatggaatggactccaatggaatggaaatgaaatgaagaaatagaatggaatagaacggactcgaatggaaaaggatgggatgtaatggaatggactccaatggaatggaatggaatggatttcaacggaatggaatcgaatggaatggaatggaattgaatggactggattggaatggactggattggaatggaatggaatggaatggaatggactcgaatgcaatggaatggaatggacctgaattgaaaggaatggaatggaagggaatagaatggaatggaagggaatggaatggaatggaatggaatggaatggaatggaatggaatggaatggactcaaaggcataggaatggagaggactcgagtggaatggaatggaatttaatgtattgaaatctaatgaaatgcaatataatggaatggaaaggaatggaatcgaatcgaatagaatggaatggactctaatggaatggaatggaatcaaatggaatggagtgcaatggattcaaatggaatggaatgcagttgaatggattcgagtcaaatggaatgtaatggaaggaaatggactcgaatggaatgaaatataatggaatgaaatgcactttaatgaaatggaatataatggtatggaatgaaatggaatggaatggacttgaatgttatggaatgcaattgaatggactcgaaaagaatggattggaacggaatgaaatggagtggaatgcaatggactcgaaaggaatgtaatggaatgaaatttgctcatgtggaattcaatggaatggaaaggaatgggaaggaatgtacccgaatgtaacgcagttgaattgaatggtcccgaaagcaatggaatggaatgaaatggaatgcaatggaatggattcgaatttaatagaatcgaatggaatggactcgaataaaatgcaatggactcgaatggaatggaatggaatggaatcgagttgagtggaatagaatggaattgaatgaaattgagtcgaatcaaatggaatgcagtggaatggacccaaatagaatgcaatggaatgcaatagactcgaatggaacggaattgaatggaatggactcgaatggactgcaatggaatagaatggagtcgaatggaattgaacggacgcaaatgcaaattaatggaatggactagaactgaatataatgtaaccaaattaaatggaatggaatggtgatgaacggaacagaatggaatggaatgggaaggaatttacacgaatttaacggaacggaatggaacggaatcgaatagaaaggaatggaatggaatggactcaaatggaatggaatggattcgaatggaatgaaatgtaatcgaatggccttgaatggaatggaatggatttgactcgaatggaattgaatggaatggacctgaatgtaatggatcgaaaagttgtcgaattgaatcaaatggaatggattggtctcaaatggaatggaatggaatggaaaggaatgggttcgaatggaatggaatggaatggaatggaatggaatgggtttaaatggaattcacttgaatggaattgaatggaatggactcaaatgaattagcatggaatggatttgaatcgaatgcaatggaatggactcgaatggaattgaatggactcgaataaaatggagttgaatggactcgaatggaattgaatgcaatggactgtaagggaatagaatggaatggaatggaatgaagacgaatggaatggaatggaatgaacacgaatggaacggaatggaatggaatggaatgaaatggactcgaatggaatggaatggaatggaaaggactcaaatgtaatggaagggaatgcaatggcagggaatgaaatggaatagactcgaattgaatgcagttgaattcaatggacacaaaatgaatagaaaggaatggaatggaatttaatggaatggaatggaatggaatgaaatggactcgaatggaatggtctccaatgaaatggaatggaatggaatcgacttgagtgtaatggaatggaagggaaacgacagaaatggaacgtagtggaaaaaattggaatggcatgcaatggaatggaatagactcgaatggaatggaatggaagggaatggaatggaatggactcgaatggagttgaatagaattgacaaggaattgaattgaatgtaatgtaatggattggaatagaatggaatggaatggaatggattcaaacgcagtggaatggattggactcaaattgaatagaatggaattgactcaattggaataaattggaatgtaccctaatggaatggaaaagaatggactcgaatggaaatgaatggaatggaatggaatggacatgaattgagtggaatgcaacggaatagaaaggaatggatttgagctgaatggattagaatggaatggaatcaaacggagttgaatgaaatggaatggaatggatttgaatggaacggaatggatttgaatggaatgtaatgaaacggaatggaggggaaaggactcagagtgaatgtaatggaagggactcaactgtaatggaatggaatggactcaaatgccttagaatggaatggaatagacccgaaaggaacgtgttggaatggacacgattggaatggaatggaatggaatggacttgaatggaatagaatggaaaggaatggaatggagtcgaatgatatggaatggaatcaaatggatttaaatggactcgagtggaatggaatggaatggaatggaatggacttgaatggaatggattggaatggattctaatggaatgaagaggaatttattggatttgattcaaacggtatataatggtatggaatgaacttgaatggaatggaaggaaatggactcaaattgaatggaatggaatggaatggactcgaatgaaatagaaatgaatggaatggaatttaatcgaatggtacggaatggatatgaatggactcgaatggaatgaaatggaaaggaattggaaaacatggaatggaatagagtgaaatgtaatggtagggaagggaatggaatagactcgaatgaattggattggaatgaactccaatggaatgaaatggactcgaatggaatggagtgtaacggaaaagactcgagtagaatggaatggaatggaatgaccactaatgtgatggaatggtatgcaatttactcgaaaggaatggaatgtaaaagacccgaatggaatgcactggaatgtaaggaaaaagattggactcgaatggaatggaatggaatggaatggaatggaatggaatggaatggaatggaatggaatgcaagaaacccaaatgcgatagaatggattggaatggactcgaaaggaatggacccgaatggaatggaatgaaatggaatggaatgcaatagactcaagtggaatggaatggaaaggaatggacccgattgatatgaaatggaatggaatggacttgaattgaattttaaggaattgaccagaatggaatggaatggaatggaatggaatggaatggcattgagaggtatgcaatggaatgggcctgaatggaatagaacggaatggaatggaatggaatggaatggaatggaatggaatggaatggaatggattggaatggaatggaaaggactcgaaaggaatggaatggaatggactggattggaatggaatggacataaatggaagggaatggaatggaatgaactcaaatggaatacaatggaatttaatggaatggactctaatttaatggaaaggaatggaatggacttgaatggaatagaatggaatagactcgaatgtaatagaatggactgaaaaggaatagaatggaatggactcgaatggaatagaatggaattgaatggactccaatggactgggatggaaaacatggaatggaatggaatggaatggaatggaatggaatggaatggaatgcaatgcaatgcaatgcaatggagtggaatagaatcaaatggaatggaatgcaatagaatggactcgaatggaaaggaatggaattgactctagtggaattgatgggaatggagccaaatggaatggaatggaatggtatggactcaaattgaatgcaatggaatggattctgctcaaatagattggaatgcaattgaatggaaaagaatggaatggagtagaatggacaggaattgaatgggtttgaatggaatggactcgaatagaatttgaaggaatggactcaaatggaatagtgtggaatggagtgaactcgagtacaatgtaatggattacactcgaatcgaatggaatttactctaacgtaatggagtggaatggtgtcttttggaacggaatggcattgaatggactcgaatggtatggaatgcagtggagtggactcgaatggcatgcaatggaatggaatagactagagtggaatggaatggaatgggatggattcgaatgaaatggaatgcagtggaatgaagtcgaaaggcatgcaatggaaaggaatagactcgaatggaatgcaatggaatggactcgaatggagaggatttgaatggacccaaatagaatggaacggaatgtaatggaatggaatggaagggaagagactggaatggaatgggttttaatggaatggactcgaatggaatggaaggcattggactcaaatggaatggaacagacacgaaaggaattggaatgcatggacacgaatgtaatggaatgaattggaatcgagtcgaggagaatggaatggaaaggaatggatttgaatgcaatggaatgcagtggaatggactcgaatgaaatggaatggaatagaatggaaccctatggaattcaacggaattgaatggactcgaaaggaatggaatggaatggaatggaatgggatcgaatggaatgaaatggaatggaatggaatcgaattgaaggatatggaatacaatggaatggactcaaaaagaatgcaatgaaatggagtcgaatgaaatggaatagactagaatgggatggaatggaatggaatggactcaaatggaagggaattgaatggactctattggaatgggaaggaatggaatgtactcgaatggaaaggaatggaatggacttaaatggaacagaatggaatggaatggactcgaatggaaggtaaaggaatgtgctcgaatggaatgaaatggactcaaaagaaggttatggaatgcactcgtatggaatagaatggattggaatggacacgaatggaaaaaaatggaatggactcaaatggaatagaatggaatggactcgaaaggaatggaatggaaaggaatggaatcgaaaggaatggaatggaatggaaaggattcgaatgcaatggaatggaatggactcgaatggaatgggttggaatgaaattgactcaaacggaatggaatggaatgaaatggactcgaattgaatggaatggaatggacttgtatggaatggaaaggtcttgaaaggaatgcaatgcaatgcaatggactcgaaaagaatggaatggaaaggattggaattgtatggaatagaatgcaatgcactcaaaaggattggagaggaatggagtggactcgaatggaatggattgtaatggtatcaaatgaaaagaattggaattgaaagcaatcgaatttaatagaatataacggaatgcaatggactcaaatataatggaatgtaatggaatgaaatttactcgaatggagtcgaatggaaaggaatacaatcgaaaggaatggaatggaatcgaatggaatggaaagaattggtctcgaatggaatgcaattgtaatgtatggactcgaaagaaatggaatggaatggaatggaatgcagtcgagtggaatggaatggaatggaatggaattgactggaatggaaagcaatggattctaacggaatggaatggaatggactcgaatggaatggaatggaatggaatagaatggaatggaatggaatggactcaaaaaatggaatggaatgcaatggaatggactcgaatgtaaagtaatggaatggactcgaatgcaaagaaatgaaatggaatagactctaaaggaatggaatgcaattgacacgcatggaattgaatggactggacctcaaatggaaggcattgaagggaatggactggattggattggaaaggaatgcaatggactcaaatgaaatggaatggaatggaatggattcgaacgaaatggaaaggaatgaactcgaatgaaatgagttggaatggaatggactcaagtgaaatagaatggagtggaatggacaggaatggaatggaatggaattgattcgactggaatgcaatggaatcgaatgcaatggaatgcagtgaaatggactcgaatggaatggaatcaaatacaatggaatgcagtgaaatggactcgaatggaatggaaaggactggaaacgaatggaataggatggaatggaatggactcgaatggaatggaagagaatggaatggaatggaatggaatggaattgattcgactggtatgaaatgcaatggaaaggaattgaatgtaatggaatggaaaggattcgaatggaatgaaatggaatggaacggaatggaatgggatggaatgatatgtacctaaatggaatggactcgaacggaatgcaatgaaatggagtcgaatggaatggaatgcagtggaatggaatattatggaatggaaaggaatagaatggaattgaatggaattgaatggactcgaatggaatagaatgaaatcgaatgaaataggaatggaatggaaagaaacggaatggaatggactcgaatagaatggaatggaatggaaaaaaacggaatggaatggactcgaatagagtggaatggaatggaatggaatggaatgcttggaatggattcgagtgcaacgaaatggaatcgaatgcactagaaaggaatggattggaatggaaaggaatggaatggaatgaagtggaatggaatggaatggaatggaatggaatgcaatggaatgcaatggaatggaataaaatgggctcaaaaccaaaggaatggcacggacctgaatggaaaggataggaattgattcgaacggaatagaatggaatggactcgaatggaatggaatgcaatggagtggactttaatgaaatggaatcgaatggactcgaatggaatggaatggaatggaattgaatggtctcgaaaggaatggaatgaaatgcaacagaaagggctcgaatggaatcgaatggaattgactcaaatggaatagaatagaatggacccgaatggaatggactgtagtggtctcgaatggaatggaatgtaatggaatggactcgaatggaatggaatggggtggaatggactcgaatggaatgtaattcaatggaatgaaatgtattagaatggaatggaattgaatggactagaatggaatgggttggaatgcaatggactcaattgcaatggaatgtaaaggacttaatcggaatagaatggattggaatggattcgaatagaatggaatggactcgaatggaatggaatggaatggacccgaattgcatggaatggaatgggatcgaatggaaaggaatggaatggtatggaattgaatggatttgaaaagaagagaatggaatggagtagaacagaatcaaaaggaagagagtggaatggactcaaatggaatggaatggacacaaaagcaatggaatggaatggaatggacttgaatggattataactgaactgaatgaaaaggtctccaatggaatgaaatggaattgactcaattggaatgtaatggaatgaaacggacacagatggaaaggaatggaatgcaatgcaattcaactgactagaaaggaatggaatggaatgcagtggattggactcaaacgtaatggaattgaattgactacaatggaatagaatggaattgaattttctcaaaaggaatggaatggaatgcaacggaatggactcggattgaatgcaatggaattctctcgaaaggaaatgaatggaatacactcaaaaagaatggaatggaacaaaattgacacgaatggaatgaaatggacttgaatgaatcgcaaaagaatggaaaagaatcgagtggaatggaatggaatggaatggaatcgactcaaatggaatggaacggaatggaatggactcaaaaggaatggaatggaatggacccgaatggaatcgaaaggaatggaatggagttgaatggaatgtaattgaaagcactcgaatggaaagggatgggatgaactgcaaacgaacgcaatggaattgaatggaatggagtcgaatggaacgaaatacaatggatccgaatggaatggaaaggaatggaatggactcaaatggaatggaattgaacgaaatggaatggactcgaatggaatggaatggaatggaatggaatagaatggatatgaatttaatagaatggaatggaatcaaaatggaatggaatggactcgaattgaatggaatggattgcaaatcattcaagtcgaatggaatggaatggacaagaatggaatggaatggaaaggaatggacccaaggggaatggaatggaatggaatggaatggaatggaacggactcgaatgcaatggaatggaatggaatggaatggaatggaatggaatggaatggaatggaatcaaatttaacgaaatggaatggattggactccaatggaatggaatggaatttaaccgattggaatggaatcgaatagattggaaacaaatagaatggaatggaatgaaatgtaatggaaaggaatggaatggaatggaacggaatggaatggaatgggtcggactggactggaatggaactaaatggaatggaatgcattggaatggaaagtaatggaacaggctggaatggaatggaacagactggaatggagtggattggacttgattggaatagaatggaatggattggaatggactcgaatgtaacggagtggaatggattccagtgtaatggaatgaacacgaacggaatagaatggaatagaattgactcgtatggaataaaatggaatttaatggaatggactctaatggaaggtaatggaatggactccaatggaatagaatagagtggaatccagtcgaatgcaatgcaatgggatggactcgaatggaatggactcgaatggaatggaatggaatggaattgaatggtctcgaaaggaatggagtggaatgcaatggaatgaacttgaatggaatgtcatgcactagaatcgaatgtaatggaatgcaaaggaacagactcgaatggaatgcatttgaatggattggactcgaagggaagggagtggaattgaatggaatgaaatggaatggagtggaatttaatagaatgaaatggaaaggaatggaatgcaatcgaatggaaacaaatggattcaaatggaatggaatggaaaggacccacatggaatggaatggaaagatatgatgttgaatggaattgactcgaaaataatggaatagaatgtgtccaaaaggaatggaaaggattggaatggaatggaatggaatggaacggaatggaatggacgtgaatggaatggacatgaatggaatagaaaggaatggaatggaatggaatggactcgaatggaataaaatggaatttaatggaatggaccataaagtaatggaatggaatggatttgaatggactagaatggaatgcacttgcatggaatgtaatataatggagtagactcgaatggaatggaacggaatggacttgaatggaatctaattgaattcaatggacccgaaaggaacggaatggtgtgcaatggaatggacttgaatggtatggaaagaattggacatgaatggaattggatacaatggaataaaattgaatgcaatggaatggaattgacttgaatggaattgaatggaatggaatagactcaaaaggaatagaatggaatgggagggactgtaatggattggaattgaatggactcaaaaggaatggaatggaatggaatggactctaatggaatggaatggaatcgaagagaatggaatggaatggacttgaatgaaatggaatggaatggaatagactcgaatggaatggaatggagtgaaatggaataaactcgattgcaaaggaatggaatggaagtctatggactagaagagaatggaatcgaaaggaatggattgaaatgaaatggaatcaaactggttgaaatggaatgcattcaaatggaatggaacggaatggactaaaatggaatagaatcgaatgcaatggacacaaatggaatgcaatggaatggactcgaatggaatagaatagacaagaatggaatggaaagcagtggaatggaatggaatggactcgaatgtaatggaatgtactcgaatggaatggaatggaatggaatggaatggaatggaatggactcgaattgaatgcaactgaatttaatggactcgaaaggaatcaaatggattggaatggaatggaagggactggaatgcaatggactcgaatggaatggaatggaatggactcgaagggaaataaatggaatggaatggaatggaatggaatggaatggaatggaatggaattgaaaggaatggaatggaatccaatggactcgaatggaatggaaggaaatggaatggaatagaatggacttgaattgaatggaatggattggactcaaatggaatgcagtaaaacggaaacaactcaggtttaatggaatggaatggaatggactcaaaaggaatggaatggaatcgaattactcgaaaggaatggaatggaatggaatagaatggactcgaaaggaaaggaatggaatggattcgaatggaatggaaaggactcgaatggaatgcaatggaaaggaaacgactcgagtttaatggaatggaatggaatggactcgaatggaatggaatggaatgcactcgaatgcaatggaatggaatggaaaggacctgacagtaatggaatggaattgaatggactctaatagaatagaatggaaaagacttgaatgaaacggaatggaatggattggaattgaatggaaagtaatggaatggaatgcactagaatcaaatagaatgtaatagaaaggaatggattccaaaggaagggaatggagtgtacaagaatggaatgggatggcaaaaaatggaatgaaatagaatggaatggaacacaatggaatttaatggaatggactgtaatggaatggaaatgaatggactcaaaagtaatggaatggaaacgaatggattcgaaaagaatggaatggaatgcaatggaattcacccgaatggaatggaacggaaaggactcgaaagcaattgaatggaattgaatggaatcgaaaagaatgaaatgcaatgcaatggaatggactcgaatggaatggaatggaatggactcgaatggaatggagggcattggaatggtctccaatggaatggaatggaatggacaggaatggaatggaactgaatggaatcgaagggactggaatggaatggaattgaatggaatgaaaacgacttgaatggaacggaatggaatggactcaaatttaatggaatggactcgcctggaagagaaagaactcgaatgaagttgaatggtatggaaccgactcaattggaatggaatggaatggaatggaattgatttgactcgaatggaaaagaaagaaatggacttgaatggaatggaatggaataaaattgaatccagtggaatggaatgcaatgcaatggaatggaatggaatggaatgcaatgcaatggacacgaatggaacgtaaaggaattgactcaaatataatagaaaggaaatgactcgattggaatggcatggaaagtaatggaatggatttgaatggaatggagtataatggaattaaatggaatggaatggaattgaagggactcgaatagaacaaaatatcttggtatggaatggactcgaatggaatggaatggaatgaaacggactcgaatgaaatgaaacggaatggaacggactcaaatggaatggaaaagaatggactcaaatggaatggaatggaaaggactcgaatggaatggaatggaaaagaatggagttgaatggaatggaacggaatggaatggatttgaatgcaatgcaatggaaaggacttgaatggaatgggttgtaatggaacggacacaaatggaatggaatggaatggactcgatttgaatggaatggaatggactcgaatggaatggaatggacttgaacggaattcaatgcaatgcaatggactcgaatggagtggaatggaatggatttgaatggaatagaatgcaatgcactcaaagggaatggagaggaatgcagtgcacaggaatggaatggaatggaattgtttcgaatggattacaatgggatggactcgaatggaatggaatggaatggatttgaatggacttgattgtaatggaatggaattgaaaggactccaatggaatggaacgggatggactgcaatggaatgggatggaatggaatggattcaaatttaatggaatggaaaggaatggaatggacttgaatggaatagaatgggatgggatagaatggactcaaaacaatggaatggaatggaatggaatcgaatggaacctaatagactcgaatggaatggagtggaatttaaagtaataaactgtaatgaaactgagtctaatgaattgaatggaatgcacaccaatggaatagaatggaatggaattaaatggaatggaatgcaatggaatggactcgaatggaatggaatggaagagacatgaatggaatggaatggaatttagcggtctagaaaagaatggaatggaatgtaacggaatggacacgaacggaatggaaaggaattgactcgaatggaatttaatggaatggacccgaatggaatggaatagactcaaatggaatggaaaggagtggaatggagtcgaaaggaatggaatggaatgaactcgaatggaatggaatggcatagaatggactccaatggaatggattggaatccactcgaatggaatggaatggaatggaatggaatcaaaaagaatgtaatggaatggaatggaatatattctaatggaatagaatggaaaggactggaatgaaacggaatggaatggattggaattgaatggaatggtatggaatggaatggacttgaatcgaatagaatgtaatggaaacgaatggactcaaaacgaagggaatggaatggaatagaatggaatggaattgaaaagaatagaatgaaatagaaagcaatgaaaaacaatggcatttaatggaatggactctaatggaatggaaacgaaaggactcaaaagtaacggaatggaactgaatggattcgaaaacaatggaatggaaagcaatgcaatgtactcgaaccgaaaggaatggactcgaaagtaattgaatagaattgaaaggaatcaaaaagaatgaaatggaatgcaatggaatggactcgaatggaatggaaaggaatggactcgaaaggaatggaatgcattggaatggtctccaatggaatggaatggaatggactggaatggaatagaatagaatggaatagaatggactcaaatggaatgtaatggaatggactcaaaattaatggaatggcatggagtccaatggaagagaaagaactcaaatgaagttgaatggtatgcaatcgactccagtggaatggaacggaatggaatggaatggaatggaatagaatagaatgaactcgaaaggaaaggaatggaaaggaattgaatggaatggaatggaatggagtaaaattgactccagtggagtggaaaggaatggaatggacacgaatggaatggaaaggaattgactcaaaagtaatagaaaggaaatgactcgattggaatggaatggaaagtaatggaatggattcgaatggaataagttgaaatggaatagaatgcaatggaatggaattgaagggactcgaataggtcaaaatgtcttggtatggaatggactcaaatggaatggaatggaatggaatgaaacggactcgaatggaatggaatggaatggactcgaatggaatagaatagaatggactccaatggaattgaatggaaaggaatggaatctaatggaatggaacggaatggaatggatttgaatgcaatgaaatggaatggacttgaatggaatgtgttggaatggactcaagtggaatggaatggaatggactcaaatggaatggaatggaatggaatggacttgaacggaattcaatgcaatcgaatggactcgaatggaatggaatggaaaggaaaggaatggaatggaatggatttgaatggaatagaattgaatgcactcgaaaggaatgtagaggaatggagtggactggaattgaatggaatgcaattgactcaaatggaatgcaatggaatgcaatggaatggactcgaatggaatggaatggaatggatttgaaaggacatgattgtaatggaatggaattgaaaggactccaatagaatggaacagaatggactctaatggaatggaatggattggaatttaatggaatggaaaggaatggaatggacttgaatgggattgaatggaatgagatggaatggaatcaaagcaatgtaatgtaatggaatcgaatggaacctaatagactcgaatggaatggaatggaacttaacggaataaactgtaaaggaagtgggccttatgaattgaatggaatgcacaccaatggaatagaatggaatggacttaagtggaatggaatataatggaatggaatcaaatggaagggaattgaagagacttgaatggaatcaaatggaatttagttgtctagaaaggaatgaaatggaatataatagaatggactcgaatggaatggaaagcaattcactcgaatggaatttaatggaatggacccgaaaggaatggaatggaatggattccaatggaatggaacggaatggggaggaatggactcgaatggaatggaatggaatggattggaatgtactcgaatggaatggaatggattggaatggacacgaattgaatggaatggaatggaatggaatggaatggaatggaatggaatggatttgaattgaatggaatggaaaggactcgaatggaatggaatggaatggactccaatgtagtgcaatggaattgaaaggacacgaaaggaatggaatacagctgaatagtatggattcgaatgaaaaggaatggaatggagtggaatggaatggaatggaatggaatggaatggaatggaatggactcaaacggaatgcaaatgaatcaaatggacctcaaaagaatggaagggaatggactggactcgaatagaatggaatggaatttaatggaatggacactaatggaatggaaactaatctaatggaatggaatggattcaaacggaatagaattcaatggactctaaaggagtggaatgcaaagaaatggtatcgaatggaatggaatggaattgactcacatggaatggaatggaatggaatggaatggcctcgaaaggaatagaaagcaaggaatggactccaaatgattggaatgaaatgcaatggactcgagtggaatggaatggaatggattcgaatggaatgtaatggaatggaatgtaacagaatggactcgaatggaatggaaaggaattgaatggaatggaatggaaaggaatggaatggaatggaatggcatggaatggcatggactagaattgaatgaattgaaatggaatagaaaggactctaatggaaaggaatagaaaggaaaggattcgaatggaatggaatttaatcgaatggagtggaatggaatggagtctaatggaatggaattgaatggaatggaatggattcgaatgaaatggaatgcactctagtagaatggaatggaggagaaaggacttgaatggaatggcatggcatcgaatagaaaggaatggactctaatgtattggaatggaatggagtcacatggaaaggaatcgaatttaatgtaattgaatggaatggaacggatatgaatgtacatgaatggaattgaatggacttgaatggaaaggaatggaattgaatggaatggaaggcactcgaatggaatggaatagaagggaatccactcgattagaatgaaatggaatggaatggactcgaatggaatggaatggaatggaatggattggaatggaatggaatggacacgaatggaatggaatggaatagaatggagtgcagtggaaaaggaatggaatggaatggaatggaatggaatggaatggaatggactcgaatgcaatggaatggaatggaatgcgctcaaatggaatggaatggaatgtaagggactcaaaaggaatggaaaggaatggaatttactcgaatggaaggaaaggaaccgaatagaatggagtacaatggaatgcaaaggaccccgaaggaatggaatggaatggactggaatggaatggattggaatggacttgaatggtaaagaacggaatttaatggaatggaattgaaggaaatgaaatggattgaacagaaatggaatggaatgtactcgaaaagaatggagtggaatttaatggaatggacactaaaggaatggaatctaatggaatggacaggaatcaacccgtgtggaatggaaaggaatggaatggaatggaaaggaatggaatggcactgaatggaatcaacacgagtggaatggaatggaatggaatggaatggattggaatggaatggaatcaacccgagtggaatgtaatgtaatggaatggaatggcatggagtggaatgaacgtgagtggaagggaaaggtatggaatgaaatggaatggaatggaatggtatggaaaggaatggaatggaaaggaaagaaatgcaatggaatcaaaacgagtggaatggaatggaatgtaaaggaatggagtggaattcaatagaatcatcccgagtggaatggaatggaaaggtattgaacggaatggaatggaatggaatggaatccaatccagtgtaaaggaatggaacggaatggaatggaatggaatggaaaggaatgaactggaatggaataaattcgagtggaatggaatggaatgaaaagtaatataatgtaaatgaatggaatacacctgattggaaaggaaaggaatggaatggaatggaatgaatggaatggattggaatggaatcaacccgagtggaaaggaatggaatggaatggaatggaatggaatggaatggaatggaatggaacggaatggaatggaatggaatggaatggaacggattggaatggaatcaaccagtgtggaatggataggaatggaatggaatggaatggaaagcaatggaatggaatggaatggaaaggaaccgaatggaatggaatggaagggaatggaatcaacccgagtggaatggaatggaattaaatggaatggaatggaatggaatggaatgaaatggattggaatcaaaccgcatggaatatagtggatttgaatggaatggaatcaacatgataggaatggaaaggaatggaatggaatgcaaaggaattgaatggaaaggaatagagtcaaccctactggaatggaagggaatggaatggaaaagaatggaatggaatggaatgcaatggaatcaacccgaatggaatggaatggaatggaatggaatggaatggaatggaatggaatggaatggaatgaaatggagtaaaacggactgcaatggaatggaatggaatggaatggaatgaaatggagtaaaaccgactgcaatgtaaaggaatggaatggaatggaatgggacggaatggaatggaatggaatggaatggaatggaatggaatgcattcaaaatgagaggaatggaatggaatggagtggaatggaatggaatgacatggaatagaatgaaatggaatgcaatggaatggaatggaatggaataaaaccaagtggaattgaattgaatggaatggaatggaatggaatggaatggaatggaatcaacacaagtggaatggaatggattggaatggaatggaatggactttacacgagtggaatggaatggaatggaatggaatggaatggaatggaatggaatggaatgaatggaatcaacctgactgaaatgcaatggaatggaatggaatggaatggaatggaatggaatggaatggaatcaacacgagtggaatgaaatggaatggaatgaaatgaaatggaaaggaatggaatggaatcaacacgactggaatggaatgcaatggaatgatatagagtggaatggaatccacccgagtggaatggaatggaatggaatggaatggaatggaatgcaatggaatgcaatggaatggaagcaacccgagtggaatggaatggaatggaaatgaatggaatggaatggaatggaatcaagccgagtggaatggaatggaatgcaatgaaatggaatggaatggaatggaatggaatggaatggaatggaatggaatggaatggaaaggaatggaatcatagcgagtggaatggaatggaatgaaatggaatggaatgcatttcaatggaatggaatggaatggattcaacgcgagtggaatggaatggaatggaatggaagggaatgtaatggaatggaatcaacccgagtggaatagaatggaatggaatggaatggaatggaatggaagggaatggaatggaatgcaatggaatcaacccgagtagaatggaaaggaagggaacggaatggaatgcaatgcaatggaatccacccgattagaatggaaaggaatgacatggaatggaatggaatggaatggattggaaaggaatgcaagggcatggaatggaatggagtcaactggaatggaatggaatggaatggaatcaacacgagtggaatgaaatggaaaggaacggaatggaaaggaatggaatgcaaaggaactgaatgtaatggaatcgaatgcagtggaattgaatggaatggaatggaatcaatgtgagtgtaatggaatggaatggaacggaatggagtggaatgcaatggaatggaatggaatggaatcaatgcgagtgcaatggaatggaatggaatggaatggaggaaatagaatggaatcgatttgaattgaatggaaacaactggaatggaatggaatggaatggaatggaatggaatggaatggaatggaatggaatggaatggaatgccatggaatggaatgccatggaatggaaacgaatgaaatggaatgctatggagtcaagtggaatcaaatggaatggatttgaatgggatgtaatggaagtgaatggaacggaatggactcgagtggaatggaatggaattgaacggaatggaatggaatggaatggcatggacttgaatggaaagaaatagaatggaatataaaggattcaagtcgaatggaatggaaaggaatggaaacgaatggaattcagtggaatggaatgcaaagaaatggaccgaaatggaatggaattgaatggaatggactggactcgaatggaaaggaatggaatcgaatggattggaatggaatggagtcgaatgaaatggaatggaattgaatgatctcgaatggaaaggaatggatttgaatgtactcgaaagtaaaggaatgcacttgaatggaaaggaatgcactcgaatagaatggaattaactcgaatggattggaatgtaatggaatagactcgaatgcaattgaatgcaatggaaaggagtggaatggaatggaatggaatggaatggactcgaatggcatggattggaatgaaatagactcgaatggaatggacacaactcgaatgaagtttaacggaatggactcgaatggaatggaatggaatggaaaggaatccaatgtaatggaagggaaaggaatgacctcaaatggaatggacttgaatggaatggaatggaatggaaaagagtgaataggaatgcaaaggaatggaatggaatgatgtcgaattgcatggaatttaatggaatagaatggaatggaaaggaatggaatggaatgatgtcgaattgaatggaatttaatggaatagaatggaatggaatggaatggaatggaatggactggaatggaacagaatggaatggaatggactcgaacggaatgcaatggattggattggacacgaatggaatggataaaatggactcgaatggaatagaattgaaaggactcgaatggaatgaaatggactcgaatggaatggaatgcaatggaatggactcgaatggaatggaatggaatggaatggaatggactcgaatggaaatgagtggaatgaaatcgactagaatggaatggaatggaatggaatggaatggacctgaaaggaatgcagtgaatgaacggaatggaatgaacttgaatggaagagaatttaatggaatggattggacttgaatggaatgggatagaatggactcgaatggaatggaatggaatggacatgaataaaatggaatggaatggaatggaacatacttgattggaatagaatgaaatttaatgcaatggaaactcatggaatggaagggagtggactcaaaaggaagagaatggaatggactctgatggaatggattgcaatggaatggattcgaattgaatggaatgaagccaaatggactggaatgaaatgttatcaactcgagttgaatggaatggaatggaatggactcgaatgaatggaatgcaatgtaatggaatcgagtggaatggaatggaatttacccgaatggaatggcatggacatgaatgcaatgaaatggaaatgaatggaatgcaatggacttgaaaggaatggaatggaataaaatggactcgaatgaaatgtaatagactcgaattgaatggaatggaatttacttgaatggaatggaattgactcgaatggaatgcaatggaatggacctgaatcgaatggaatggaatgaaaataaacagaatggaatggaatggaacagaccctaacggaatggaatggaatggaatggaatggaatggaatggaatggaatggaatggaatggaatggaatggactcaaatggaatggaatggaatggaatggaatggaatggaatggaatggaatggaatggactccaaagggatggaaaggaatggaatggaatcgaaaggaattgaaaggaatgaactcgaatggaatggaattgaatggactcaaatggaatggaatggactcgaagggaatggaatggaaccgcttggattggaatggaatcaaatggaatgcattggaatggaatggaatgcacttcaatggagtagaattgaagggaatggattcgaatggaatggaatgatctcgaatggaatggaaaggaatggaatcgaatggaatagaacggaattgatttgaatgaaacggaatggtgtggactcgaatggaatgtgttgcaatggaatggacacgaattgaatgaaatggagtggactcaaattgaatataatggaatggaatggactagaatagaatggaatggattggacacgaatggaattgaatggagacgaagggaatggaatggaatagactgtaatggactcgaatggaattgaatggaaagtaatggaatgaactcgaatggaatggaatggactagaatggaatttactggaatggactcgattggaatgcaattgaattgagttgaatgcaattgaacggaatgtaaaggaatggaatggaatggaaacgaattgaatggaaaggaatggaatggaagataatggaagggaatggactcgaatggaatggattcgaatggaatgttctcgaatggaatagattcaaacggaatggactgcaatggaatacatgggaatggaatagtgtggaatggaatggtctcgactgaaatagaatatactggaatggaaatgaatagaataaaaagaaatggaaaggaatttattcaaatggaatggaatagaatggaatggactcaaatggaaattacttgaatagaatggaatggaatggaatggaatggagtcgaatggaacggactctaacgtaatgcactggaatggaaaggactcgaaaggaattgaattgaatggaatgaaatcaaatggaatggaatcgagttgaatggaatggaatcgaatggaatgttaacgaatggaatggaaaggattggaatggaatgcattggaatcaaatgtaattgaatggaacggaatcgataggaatggaagggacccaaatggaatggactaaaaaagaacggactcgaaaagaatggaatctaaagaatgtaatggaatgcaaccgaacggaatacaatcgaacggactggaatacaatgtaagggaatggaatggaaaggactcgaatgtaatgaactggaatgaaatggaaccgcatggaatggaatgaaatggaattgactcgaatgttatataccagaattgaatggactcgaatgtaatagacttgaatggaatggaacagaatggaaaagaatggaatggaatgcaatggactccaatgtaatgcactggagtggaatggacatgaatggaatggactcgtatggaatggactgggaaggaatgaacccgaataaaatggactccaatggaatgaaaatgaatggaatggaatcgaacggaatggaatcgaatggaatggaatcgaatggaatggagttgactggaatggatttgaatgaaatggacttgaatggaatcgaatcgaatataaaggaatggagtggaatacaatggaaaggaaaggaatggaatggaatggaatgaaatgaaatggaatggaatggaatagaatgcaaaggaatcaaatggaatggactccattggaatacactggaatggtatagactcaaatgcaatagactcgcatgtaatgtaatcggatgaaatgaaatcaaatcgaattgaatgaaatgtaatggaaggcatcaaatcaaatggaatgcaatggaatggaagggaatggaatcgagtggaatgcaatggaatgcaactgaatggaatggaatgcaatggaatggaaattaattgagagaaatggagggcaaagaagtaattgaatggagtggactgggatggaatccagtggagtacagtggagtggaatggaatggaatggaatggaatggaatggaatggaatggaatggacttgaatagaataggatttaatgtaaaggaatggaattgattgcaaagaaattgaatgcaatacagtccaatggaatagaattgaatgaaatcgaatgtaataaaagggaacttaatcgaatggaatggactccaatagaatagattggaatggaagggaagtgaatggaatgtactcgaatggaatggcctggaatggaatgtactcgaatggaattgactcgaatggaatgaatacgactggaatggaatcgaatggaatggactggaatggaatggactcagatggaatgtactggaatgtaatgtagtctaacggtatggactcgaatagaatggaaacgaaaggaatgtaatcgaatggaaacgaattgaatagaatcaactggaatggaatggtctagaatataacagaatagaatcacatgaattcgaatggaatttaatcgaatggaaaggaatggaatggaatggggtcggatggaaataaaatgaatggaatggaatcgaacggaatggaaaggattagaatggaatggaatctaatgaattggaaaggattagtatgtaatggactggaatgtaatgtacccgaatgtaaggaactctaatggaatggaatcgaatggaatggaatcgaaaggaatggaaccaaatggaatggaatcaaagcgaatggcatgcagtggaattcgttggaatggaatagactcaaatggaatggacacgactggaatggaatcaaatgaaatggaatcgaatggaatgaaatccaaaggaatggaatcaaaaggaagagaatcaaatggaaccgaatcgaatggaatggacgggaatggaatagactggaatggaaaggctggaatggaaaagactcaaatggaatggaatggaagggaatggaaaggaatgaaaatgcgtggaatcgaatggaatggaaatgaagggaatggaatggaaggtaatggaataaatggactccaatggaatgcatttgaattgaatatactcaaatggaatagattcaaacggaatgcattgcaacgaaatacattcgaatggaatggagtggaatggaatggtctcgaacggaatggaatcgaatggaatggagtcgaatataaaggaaaggaatggaatacaatttaatcgaatgcaatcgaattgaatggaaaggactcgaatggagtggactcgaatagaatggaatggaattgaatggaatggactctaatggaatggactggaatggaatggactcgaaaggaattgaatcgaatggaatggaatcaaatggaatgggatcgaattgaatggaatggaatacaaggggatgtaatcgaatggaatggtaaggatgggaatagaatgaaatggaatggaattgaatcaaatttaattcaatgaaatggaatggaatggacttcaatggtatagaatggaatggaatggaatggaaaggaatggaatggaatggaaaggaatggaatgaaatggaatggaatggacttcaatggaatagaagggaatggaatggaatggactcgaagggaatggaaagcaatggactcgaaaggaatggaatgaactctaatggaagggaatggaatgtaatagaatggaatctaatggaatggaatccgatggaatggattggaatgcactcgaacggaacggaatggaatggattcgaatggaattgaatgcaatggaatggactcgaatggaaagaatggaattgattcgaatggaagtcaagggaatggactcgaatggagaagaatggaatggactcgaatggaatggtgttgattggaatggattggaatggaatggagtggaatggcctcgaatgaaattaagtgtactcgattggaatggaatggaatggaatgaaatggactcggatggaatggaatggtctcggaccaaatggaatggaatattctcagacggaatgaaatggaatggaacggactcgaatgaaatacaatggaatttgatggaatggacaccaatggaatggaatgctgtttactcgaatggaataaaatggaatggacttgaatggaatggaatacaatgcaatagactcgaatggaatggaagggaatggacacaaatggaactgaaaggaattgaatggattagaaaggattggaatgaaatgcaatgcaatggactcaaatgtaatggaatggaactgaatcaaaaggagttcaatggattggatctgaatgaaatggcatggaatggtatggaatcgaatggaatggaatggaatggacttgagtggaatgcaatggaatggaatggaatagattcgaatcgaatggaatcgactcgagtggaatgcaactgaattgaatggactcgaaagcaatagaaaggaatagaatcgaagggaatgaactcgtaaggaatggaatggactcaaatggaaaggatttgaatggaatggaattgactcgactggaatggaatggaaaggaatggactcgaatggaattgaatggaaagtaatggactcaaacagaatggaatggaaaggaatggacatgaatggaatgcaatggacccgaattgaatggaatggaatcgaatggaatggaatggaccctactggaatggagaggaatggaaagcactggaaaggaatggaattgaatgaaatgcaatggaatgtaatggaatgggcatgaatggaatagaatataatggaatagattggacttgaatggaatggaatggaaaggaatggaatggaatcaaatgtaatggactcgagtggaataaaatggaaaggaatggactcgaatggaatggaatggaaaggaaaggacttgaatggaatggattggacccgaacggaatggaatggattggaatggaatgcaattgaatgttattgactggaatggaatggaatagaatggaatgtaatagaaaggaatggaatggaatagaatggaatggaatgaaatggaatggaattgagtggaatggaagggaatgtagtggaacggagatgagtggaattgaatgaagtgtatttgaatggaattgaatggaacggacttgaattgaatggaaaggaatggactcgaatggaatggaaaggactggaatggaatggaatggaatttaatggaatggactctttggaatagaatccaatggaatggaatggaatcgaattgaatggaatggaatgaaatagagtcacatggaatggaatgcaatggaatggacttaaatggaatggaatggaattgagtcaaaaggaattgactgaaatggactctagtagaacagaatgggatggacacaaagggaatgatgtggaattgaacagactcgaatgaaatggagtggaacagacacgaatggaatggaattgaatggagtcaatttgaatggaatgtaatggattgaaacggactcgaaaggaatggaaaggactcaaatggaatggaatggaatagaatggaattgaagcgaatggaatggcattgactggaatggaatggaatgtactcgaaaggcatggaatggaatggaatggactccaatggaaacgaatggaaaggaatggacatgaaaagaatggaatggattcgaatggaatggaatggactgtactggaatggaatggaatggaatggaatgcactggattggaatggaatggaatgaaatgaaatggaacggaatggaatcgaatgagcttgaatggaatagaaattaatggaatggattggactcgaatggaatggaatggaatggaatggaatcaaatggaatggaatggagtggaatggagccacatggaatcgaatggaatggaatggattcgaacagaatggaaaggaaaagactcgaatgtaatgggttggaatggaatggactctgatggaattgaatggaatggaatggactcaaatggaatagaatggaatagaactgactcaattcgaatagaacggaatggaatggactggaatggaatggaatggaacggacttgtatggaattaaatggaaaggaatggagactaacagaacacaattaaatggaatggaatgtactagaatggaatggaatgcaatggacacgaatggaatagtatgaaatggaatcagatggaatggaatggattggaatggaattgactcgaatggaatggacaggaatgcagaggaatggactcaaatggaatggaatggaatggagtggagtggatctgaatggaatggaatggaatggattggaatcaaatggaatggaagggattcgaaaggaatgtaatggaatggccgcgaatgaaatgggttggaatggaatggattctaatggaattgaatggtatgcaacggactcaaatggaatagaatgaaatggaatcgaatcaattggaatagaatggaatggaatgaaccgcaaaggaatggaatgtaatggaatcgactggaatggaatgcactagtctggaatgtaatggaatttaatggacacgaacagaatagaacggaatggaatggaatgtactagaatgtaactgaatgtaatggattctaatggaatggaatggaatggactcgaatggaatgggttggaatggaaaagactcaaaactaatggaatgaaaaggaatggaatcatatggaatcatatggaatacaatggaccacagtggaatggaatagaatggattggaatggaatggaatgtcatggaatggaatggaatggaacagaatgccatggaatggaatagaatggaatgcaatggaatggaatggaatggaatgttttggaatggagatgagtggaatggattggagtggatttgaatagaaaagaatggagtggaatgcacttgaagggaatggaaaggaatgaactagattgaaatggaatggactcgaattgaatggaatggaatttaatggaatgcactctaatggaatggaatctaatggaatggaatggaatggaaaggaatagaatggaatggaatagaatggaatagactcgcatgtaatggaatgcaatggaatggaatggactcaaatggaatggaacagaactgactcgaatggaactgactggaatggactcgaatggaacagaatgggatggacttgaagggaatggtgtggaatggaatggactcgaatggaatggagtggaatggactcgaatggattataattgaatggattcgacttgaatggaaggtaatggaatgaaatcgcctcgaacggaatctaatagaatggaatggaatggtctcagacagactggaatggaatgcagtggaatggactcaaattgaatggaatggaaaggacctgaatggaatggaatggaatggaatgtactcggatggaattgaatggaatggacaagaatggaatagaatgggatggactcaaatggaattgtgtggaatgcaatggactccaacggattggagtggaatggaatcgaaagaatggagtagaattgactcgatgtgagtgggaagaaatggaatgaaattgactcgaatgggatggaatagtctcggacggaatggaatggaatggaaaggaatggaatggaatggaatgcaatggaatggaatagactgtaatggactcaaatggaaaggaatggaatggaacggactcgaaagaaatacaacgaaatttaatggaatggactctaatggaatggaacggtgtggacaaaaatggactaaaatgcactggactcgaatggaatggagtgcaatggaatggactcgaacaaaatagaatggaatggattcgaatggaatgaaatggaattgaatggactagaaaggattggaatgcaatgcaatggaaaggactcgaatggaatggaatgcaattgactccaatggaattgaatggattggacctgaatggaattgaatggaattgaatggaatggaatggaatagaatgggaaggaatggaatgcaatgaaatggaatggaaaggaatggaatgggtatgaaaggaataaaatggaatggaatcaaatggaatggattggaattgaatggactcgaatggaaattaatggaatgtaatcaaacggtatggaatgcaatggaatggactcgaataaaatggaatcgaatggactcgaatgtaatggaatggaaaggattgaaatgttatagaatggaatggacatgaatggaatggagtggaacggaatggactcgaatggaatggagtacattgcaaacgatttgattgcaatggaaatgaatgaactcgaaaagaaaggaatgtaacagaatggaatgtactcgaattgaatggaaggtaatataatgaaatttactcgaatggaattgaatggagtggaatggaatcgaacagaatgcaatggaacggaatggaaaggaattgactggaatggaatttaatgaaaaggaaaggaatggacttcaatggactataacggaatggaatggaaagcaatcaaagaaaatggaatagaatgtactcgaatggaatggaatggaatggaatggactcgaaggaaagggaatgaaatttaacagaatggactttaatgaaatggaatcgatgggaatggaatggaattgactcgaaagtaatggaatgcaatggaatggactcaaatggaatggaaagggattgactcaaacggaattgagtgaaatggacttgaatggaatggaatggaattgactcgaatggaatggtgtggaatagaagggactggcatggaatggagaagaatggagtgcacttggaacaaataatatggaatggaaatgaatggactcgaatagaatggaatagaatggaatgcaatggaatatactcaaaaggaacgtaaggtaatggaatgaaatttactcaaatgaaatggaatgtaaaggaatggactctaatggaatgcaatggaatagaatggaatggagtccactcgagtggaatgcaactgaattgaatgggctcgaaaggaatggaaaggaatggaatggaatggaatggaatggaatggaatggaatggaatggaatggaatcgaaaggaatggaaaggattctaatggaatggaatggaaatgactcgagtggaatttaagggaatggattggactcgaatggaatggaatgagatggacaggacaggaaagtaatggaatggaatggactctaatggaatggaatggaaaggaatggaatggactcgaattgaatggattggaaaggaatggaatgcactcaaacggaatggaatggaattgaatggaattgaaaggaatggaatggacaggaatgcaatggaatggaatggaatggaatggaatggaatggaatggactcgaatggaatggaaaggaatgggctcgaatggaaagtaaagaactcgaatggaatggtatggaattgacgcgagtggaatgtaattgaatggaatggaattgactgtaatacaaaggaatgcaaagaacacgaatgaaatagaatgcaatggaatggatttgaatggagtggaaaggaatggactcgaatggaatggaatggaatggattggaatgaaatggactggaatggaatggaatggaatgaatggaatggaaatgactcgaaaaaacggaatgaaatggacacaaacggaatggaatggacttgaatgaaattgaatggaatggtctcataagtaatggagtgcaataggctcgagtggaatggaatggaatgcaatggactcgaatggaatgaaaaggaatagaaatgactcgaattgaatggaatggaatggaatccaatgcaatagaattgattggaattcacatgaacggaatagaatacaatggagtcaaatgtaaaggaatggacatgaatggaatggaacggactcaaatggaatatagtggaatggaatcgaatggaatggaatgcaattgaatggattcgaatggaaaggaatagattggattcgtgtggaatggaatggaacggaatggaaaggaatgtatgcgaatggaatggaacggaatggaaaggaatgtatgcgaatggaatggaacggaatggaatgcattgcatccgaaaagaatggaatggaatgcaatggaatggaatcgaatggaaaagaatggaaaggactggaacggaatggaatggaatggattggaatggaatggaatggtatggaatataatggacttcagtggaatagaatgtaatggaaaggaatggatttaaaaggaagggaatggactctaactgaatggaattgacaagaatggaatgcaatagaatggaatggaatacaacggaatttaatgtaatggaccgtaatggaatggagtggaatggaatggactcgaatggaatggaatggaattgacttgaacggaattgaaagcaatggacccaaatggaatgcaatggaatggaatggaatggacacgaatggaatggaatggagtgtattggactcgaatgtaacagaatggaatagaatgcaatggaaaggaatggaatagattcaatcggaatggaatggaatgaactcgaatcgaatggaatacaatggattggactcaaatggaatggaatagaattgaatggattcgaaaggaatggaatgcaatggaatctaatgaaatggtttggaatggaatggaattgaatggaatggactgaaatggaatagaaaggaatcgaatggagtggaatggattggaatggaatggactcgaacggaatggaatggattcgaatggaatggaatggactcaaatggaatagagcggaatgtaaaggaatgtactagaatggaatgcaatggaatgaactcgaacggaatacaatggaatagaattaaatggaatggaatggacctgaatgaaatggaatggattcaaatggaatggaatggacccgaatggaatggaatggaaacgactcgagtggaatgaaatggaatggaaaagacatgaatggattggaatggaatggacttgaatggaatggaataaaatggaatggaatggacttgaatggaaatgaatgggatggaatggaatggactcgaagggaatggaatggaatttattccaatgtaattgaaaggactcgaatgaaatttaaaggaatttaatggaatggaatcaaatgcaatcgaatggactcgaatggaatggaatggaatggaccaaccttgaatggaatggaatggaatggaatggaatgaaatggaatggaatagaatggactctaatgtaatgcaataggatggaattgaatggaatggaatggactcgaatggaatggaatggaatcgacccaagtttaatcgaatggaatggaatggtacggactcaaatggaaaggaatgaaatggactggaatcgaatttaatgaaatggaatggaatggactcgaatacaaaggaatggaacagaataaaaaggaatggaacggaatggaatgcacttgaatgatttggaaaggaatggactcaaatggaatggaatggactataacggaatggaatggaatgaaatggaatcgaaagaaacagaatagaatggaatggaatggattcgtgtagaatggaatggaatggactcgagtggaataaaatccaattgaatggactagaaagtaatgaaatggaatgctatggaatggaatggaatggattcgaatggaatacaatggaatggattggaatggatttgaatggaatggaatggaatggaacggacttgaagggaatgaaatggaagagaatagaatggaatggaatggactcgaaaggaacggaatggaaaggactcgaatggaatggattggaatggaaaaaatcgagtggaatggaatgaaagagaatggactcgaatggaatggaatggaatggaatggaatggaatggaatggaatggaatggacacaaatggaatggaaaggaacggacccaaatggaatggaatgcaatggaatggaatgcaatggaatggaatggaattcaatgcaatggaattgaatggaatggacttgaataaaacggaattgaatggatccgaaaggaatggaaagcaatggaatggaaaggaatggaatggaatggaatggagtggaatggaatggagtggaatggagtggaatggaatggaatggaatggaatggaatggaatggaatggaacggaatgcaatacactggaatggaatggaatggaatggaatggaatggaatggaatggaatggaatggacttgaatggaatacagtggaacttgatggaacggaacataatggaatggaatggaatggattcaaaaggaatagaatggaatggactcgaatggaatggaatacaaaggaaaggactcgaatggattggaatggaatagaatgcactcgacaggaacggaatgcaatagaatggccttgaaaggaatggaatggaattcaatggaatggactcaaatggaatggaaaagattggacccgaatggaatggaatgcaatttaattgacttgaattgagttgattcgaatttattcgaatgaaattgaatggaatataacggattcaaaagtaatagaatggaatggaatggacttgaatgtaatggactagaagggaatggaatggacatgaaagcaatggaatggaacggaaaggagttgaaaggaatacaatagaatgaagtggaatgggctcgaaaggaatggaatggaatggactcgaatggaatggaatgcaatggaatagactataatgaaatggaatggaatttactcaaagggaatagaaaggaatggaatcgaaaggaatggaagggaatgaaatggaatcgaatgggttgaaatggaattgatttgagtggaatggaatggaatggaatcaaatggaatagaaaggaacggaattgacacgaaaggaatagagtggtactgaatcgaatggaatgaaatggaatggaatcgaatggaatagaatggaatggactcgaatggaatgcagcggaatggaatggacttgaatgaaatgaagtagaaaggactagaatggaatagaatggaattgaaaggactcgaatggaatggaatgtaacggaatggaatagagtataatggaatggaattgaattgaaagtactcgaatggaatggaatggaatggcatggaatggactcgtatggaatgcaatgtaatgcaaagaaaaggactcgaatggaatggaatgcaatgcaatgaaatggaatggactcgaattaaatggaatggaattgaatggaatggactccagtgaaatgcaattgaatggaatgcactcgaaaggaatcgaatggatttgaatggaatggaatggacttgaatggaatggactcaaatagaatggaatggaatggacacaaatggaaaggaatggactcgaatggaatggaatcgaatcgaatcgactaaaatggaatagaatgcattggaatggacttgaaaggaatgaaatggaatggaatggacccgaatggaatggaatggagtggaatggattcgaatggaatgaaatggagtggaactgaatggaatggaaaggaaatcaatggaatagaatggaatggaaagtactcaaatggaatagaatggaaagggctcgaatggaatggaatggaatggactcaaatgaaatgaaatggaatgcactcgaatggaatagaatggaatggagttgaattgaatgcagtggaatttaatggacttgaatggaatggagtagaatggtctagaatggaatggaattgaaaggatacgaatggaatggaatgtaatggaaaggaatggactacaatggaaacgaattgaattgaaaggactcgaatggaatggaatgcaatggcatggaatggacgcgaatggaatgcagtgtaaggcaaagaaatggacttgaatggaatggaatgaaatgaaatacaatgaaatggaatggactcgaatggaatggactccaatggaatgcaattgaattgaattgactagaaggaatcgaatggattgcaatggaatggaatggactggaatggaatggactcaaatggaattgaatggaatgaaatcgaatggaatggagtggtgtcgaaaggaatggaatagaatagaatcgactaaaatgaaatggaatagaatgcactcaaaagaatgaactgcaatggagtcaaatggaatagaatggagtagaatcgaaaggaatggaagggaatggaatggacttgaatggaatgtaatggacttcaatggaatagaatggaatggaatggattcgaacggaaaggaatggaacgtactcaaacggaatggtatggagtggactcacattgattggattgggatcgaatggaatggaaagaaacgtacccaaattgaatggaatggaaaggcatggaatggaatggaatgtaacggaacggaacagaacggaacagaatggaatggaatggaatggactggaatggattgtaatggaatggaatgaaacggaacggaacagaatggaacggaatggaatggaatggaatggaaaggaatggaaaggaatggaatggactagtttggaaaagaatggaatggaattgaatggactcgaaagtaatggaatggaatcggttcgtgtggaatggaatggacacgaatgtaacggaatgtaatagaactgactcaaatggaatgcaacggaatttaaaggaaaagacactaatggatagaaatggaatggagacgaatgaaatagaatggaaaggaatccaatggaatggaatgcaatacaatagaatcaaatgggagggactcaaacacaatgtaatagaattgaatgttgtcgaaagggaaggaatgtaatgcaacgaaatggactcgaatggaatggaatgcactggactcgaatggaacggaatggaatggactcgaatgcaatggcatggaatggaatgaaatgcaatggaatggaatggatttgagtggaatggaatgtataggaatggagtcgaattgaaaagaaagaaaaggaatagaatcgaatggaatggaatggacccgcatagaatggaatggcatcgaatggaatggaattgactgtaggggaatggaatagaatgaaatggaatggaattccttgaatggaatagaatttaatggaatgcattgtacgccaatggaatggaaagttatggactcgaaaggaaagcaatggaatggtatggacttcaatggaatggaatggaaaggaactgaatgaaacggaatggaatggaatggactcaaatggaatggaatggaatggaatggaacggaatagaatggaatggaatgtactccaatggaatgaaatggaatggatcggactcgaatggaatggaatgttatggaatggactcgaatggaatgaaaaggaatgaaaaggaatggacttgaatggaatgaaatgaagtggcatagatttgaaaggaatggaatttaatggacctgaatataatgtattagaatgaaatgtaatggactcgaatggaatggaatggaatggatgggaatggagtggaattgaatggaatggaatggaacggaatttaatgaaatggaatcgaattgaatgggatggaatggacccgaatcgaatggaatggaatggaatggaatggaaggcaaaggaagggaatggaacggaatggaggtgaacggaatggaatggaattgaatggacttgaaaggaatggaatggaatgcaatgcaatggaatggaatgaaatgaaatgtaatggactctaatggaatggcctagaatgggcacgaatggaagggaaagaactggaatagaatgaaatggtatgaaatcgacccgattctaatggaatggaaaggaatggaatggacttgattggaaaggaatggaatgttcgtgaatggaatggaatacaatggaatgaaatcgactctagtggaatgaaatggaatggaaaggaatcgaatgaacttgaatggaatgtagtggaatggaatcgactggaatgcaatggaattgaatggactcgaataaaaaagaatgtaactgtatggaatggactcgaatggaatggaatgcaatggaaggaaatggacttgaatagaatggaatggtatggaatagagtggaatggaatggaatggactccaaaggaattgaaaggattggaatggaatggaatggaatggaatagactcgaatagaatggcatggaatggactcaaatggaatagagtggactcgcatgaaattgaatggaatggaaacgattaaagtggaatacaatgaaatgaaatagactggagtcaaaataactgaatggacccaaatgtaatggaatggaatggaatggaatgaaacggactcgaatggaagggaatggaatggactggaatcaaatgcaatgaaacataatggaatggagttgaatggaatggaaaggaatggccacaaatggaatgcaatggaatggaaaggaatggtatggaatggaatggaatgatacggactggaatggaatggattggaataaaatatacatgaatggaaaaaaggtatggaatggaatggacccaaatggaatggaatggacacgaatgaaatgaaatagaatagaatggactcaaatggaatacaatggaatttaatagaatgaacactaatgtaaaggaatggaaggcactctaatggaatagaatggaatggacttgaacggaattgaatggaatagactcgaatggaatagaatagtatggatttgaatggaatggaatgcaatggaatggactcaagtagaaaggacaagaatgtaatggaatggaattgaattgatctgaaaggaaaggaatggaatgcaatggaacggacttgaatggaatggaatacacaggactcgaatggaatggaatgcaatggaatggacttgaatggaatggaatggaatggaatggataggaatggaatggaatagaattgaatggactcgaaaggaatggaattgaatgcaatggaatggactcgaatggaatgtaaaggaatggacccgaatataatggaatgcaaacgaatgaactcgaatggaatggaatgcaattgtctcgaatggaattggatggaatgcaatggacttgaattgaaggcaatagaatggaatcgaatggaatggaatgaactcgaatgcaatcgaatggaatggaatagactcgaatggaatacaatggaatgaaagggaatggactgaattggaatggaatggaatggagtcgattagaatagaacagaacggaatcaaaaggaatggaatgcaatgaaatggaatcgagagtgttggaatggaattatcatgaatggaatgaaatggaatggacacatatggaatacaatggaatggaatggatgctaatggaatggaatggaatggacacgactggaatggaatggactcgaaccaaatggaatggaatggaatggactcgaatggaatgaaatggaattgaatggaatggactgaaatggaatggaataaaatggacttgaatggaagaaaatggaatggatatgaacagaatggagtggaatggaatggacttcaatggaatggattcggatggactccaatggaatggaatggaatggaatggactcgaatggaatggaacgtaacggaatgaaatggactcgaattgaatggaaagaaatggactcaagtgaaagggaatggaatggaatgaaatggactcgaatggaatgcaactgaattgaagggactcaaaaggaatggaatggatttaatggaatggaatggaatggaaagtaatggacccgagtggaatggaatggaaagaactcgaaaggaattgaatggaatggaacccaatgaaatgtaatggaatggaatggaaatgcatggaatggattcgaacggaataaaatggaatggaatggaatggaatggaatggattcaaagggaatgcaatggaatggaatggaatttaatttaatgaacggactctaatggaatggaatgtactcaaaagcaatagaatggaatggatttggaacgaatggaatataatggaaagggctcgaatttaatggaattgaatggacttgaattcaatataatggaattcaatcgaacggaatggaatggacacgaatacaatgcaatggaatgcaatagaatggaatagaatggactcgaatggaatggaatggaccaaaatggaatggaacggaatggacccgaattgaaaagaatggaatggactgcaatggaatgcaatggaatggaatggaatggagttgaatggaatagaaaggaatggattcgaagggaatgaattggaaaggactagaattgaatggaatggcctcgaatagaatggaatggaatttactagaatggacactaatggattggaatctaatagaatggaacggcatggactctaatggaatggaatggaattgaatggactataaaggaatgcaatggaatagaatggaatggagttgaatggaatagaaaggaaaggaaaggaatggatttgaagggaatggaatggaaaggactcgaattgaatggaatggcctcgaatagaaaggaatggaatttaatagaatggacactaacggattggaatctaatacaatggaatggcagggactctaatggaatggaatggaattgaatggactataaaggtatggaatggaatggaatcgaattgaatggaatggaacggaccgaaatggaatagaatggactcgaatggaatggaatggaatggaatggaatggaatggaatggaatccaatggaatgcagttgaatggaatggacttgaaaggaatggaatggaaaggaatggaatggaatggaatggaacggaatggaatggaatggaatggacttgaatgcaatggaatgaactagaatagaatggaatggaattgaatcaactcaagtggaatggaagggaatggagtggactcaaaggaaatggaatgcaatggaaagtactcgaaaggaatggaatgtactggacccgaatataatggaatggaaaggaatggaacggactcgaatggaatggcatggaatcgaatggactcgaacggaatggaatggaaggtaatggactcgaatggaatggaatggcatggaatctaatggactcgaacggaatggaatggaaggtaaaggactcgaatggaatggaatggaatgaaatggaatggacttgaagggaatggaatggaatggaatcgaatggaatagaatactatggattcgaatggaaaggaaagtaacggagcggaatggaatggaatggaaaggaatggaatggaacggactcgaattgaatggcatggaatggaatgcactcgaatgtaatgggatggaatggaatgaaatggaatggaaaggaatggaatccaatggaatggaaagcaatgggacgagtggattggaatggaatggaatggaatggaaaggaatgaaatggactggaatagaatggaattgtttggaatggaatgttcttgaattgaatagaatggaatgaaatggaatgtacccaagtgaaatggattggaatggacacgaatggaacgaaatggaatggatggaactcgaatggaatggaatggactcgaatggaatggaatagaacggaatggaatggaatggaatgtactcgaatggaatggaatggcctcgaatgtaatgtaatgaggaagaatggaccagaaaggaatgtaatgcaatggaatggactgaaatacaatggaatggaatgaaaaggacatgaatggaatagaatggaatgaattggaatggattggatcaaatggaattgaatggaatggactcgaatggagtggaatggactcaaatggaatggagtggaatgggacggtgtcgaatacaatagaatataatttaccggattggactctaatgcaatggactctaaaggaaaagaatggaatggactcgaatgcaatagaatggaatggaaaagtgtcaaatggaatggaatggaatttacacgaatggaatggaatggagtggaatgaaatggactggaatggaatggaatggaatgattggaatggaatggaatggaatggaatggaatggaatggaatggaatggacttgaatagaaaagcatggaatggaatggatgggactcgaatgaaatggaatggaatggaccagaatcgaaaggaatggcctcgaatgtaatgtaatgaggaagaatggaccagaaaggaatgtaatgcaatggaatgaacagaaatacaatggaatggaatgaaaaggacctgaatggaatagaatggaatggaatggaatggattggaatccaatggaattgaatggaatggactcgaatggagtggaatggactcaaatgcaatggagtggaatgggatggtgtcaaatgaaatagaatataatttaccggattggactctaatggaatggactctaatggaaaagaatggaatggactcgaatgcaatagaatggaatggaaagttgtcaaatggaatggaatggaatttactcgaatggaatggaaatggagtggaatgaaatggactggaatggaatggaatggaatgaaatgaatggaatggaatggaatggacttgaatagaaaagcatggaatggaatgaatgggattcgaatgaaatggaatggaatggaccagaatcgaaaggaatggattggactcgaatggaatggagtaaaatggactcgagtggaatggaatgcaatgcaatggactcgattggaatggaatggaatggaatggaatggaacgaactcgaatgcaaaggatgggattggagttcacttgaatggaacagaatggaatggagtagaatgtaatggaatgaacaggaatggaatggaatataacggaatggactcgaatggaatagaaaggaaaataatctagtggaatggcatggaatggaatggacacaaatggaatggaatggaatcgaatggaatggaatggaatggaattcaatggactaggatgtaatggaattgaaaggaatttaatggaatggacttgaatggaatggaaaagaatggactcgaatggaatgtaatggaccagaatggaacggaatggaatggacacaaattgaaaggaatggaatggaatgaaatagactggaatggaacacaatggaatggaatggaatggaatggaatggaatggaatggaatggaatggaatggaatggatttgaatgtaatagaaaggaatggaatcaaagggaatggaatggattgcactcgaatggaatggattgcaatggattcaaatggaaaggaacggaattcaatggactcaaaaggaatggaatgtaacggaatggaatggactccaatggaatggaagttaatggaatgaaatggactcgaatggaatggaatggaatggaatagactccaatgcaatggaatgcattggaatggattggaaaggaaaagactcgaatggaataaagttgaatggaatggactcgaaatgaatggaatggaatggaattgaatggaatggaatggaatggaatggactcgaatggaatggaatggaattgacccaaatggaatggattggaatggaatggagtagattggaatggattggaatgttatgcaatggagaggaatggaatggaatgcaatgcaatggaatggaatcgaatggaatagaataaaatgaaatggattttaatcgaagggaaagcaatggaatggttacgaatggaatggaatggaatggaatggccatgaatggaatggaatggaatggaatggaatggaatggaatggattggaatggactggactgcaatggaatggaacggaatacacttgaatgaaatagaatggaacgcaattgaatggactcgaaagaattggattggattggaccagagtggaatggaatggaatggactcgaatggaatgcaatggactagaatgtaatgtaatggaatggaatggaatggaatggaatggacacgaattgaatacagtgaaatttattctaacggaatctaatggaatggaatggattggagtcgaatagaacagacacgaagggaatggactgcaatggaatggacttgaattgcatggaatggaatggaatggacttgaaaagaatgggatggaatacaatggaatggactcgaatggaatgcaatgcactggaatggactcgaatggaatggaacggatttgactcaaatggaattgaatggagtgcacctgaatggaatggagtggaatgggatggaataaaatggaatagagtgggctcaaatagaatggaatagaacggaatggaatagaatgcagtggaataaaatgggtttgaatggaatggactgcaatggaatcgaatagaacggattcaaatggaataacatggaatgcaatgtactcgaatgcaatggaatggaacggactcaaatagaatggaaaggactcaaacggaatggaatgaaatggactcgaacgggattgaatggcatttaatgaagtcgaatggaatgcagtataacggaatggaatgaactcgaattgaatgcaatgtaatggaatgaaatgtgctcgaatggaatggaatggaatagagtggaatggaacggaagagaatggatcacaatggaatggaatggaatgcaatggagaggaatgcaatggaatgcaaaggaacggaaaggaatcgagtggaatagaacagaatgaaatgtattgtaatcgaacggaatggaatggaatggtttcgaattgaaaggagtggactggaatggaatgaaatggaatggaatggactggaatggaatggacttgaatggaatagaatggaatacagtggaatggacctgaatgaaatggaatggaattgacctgaatggaatggaatggaatggagtcgaatggagtttaatggacttgaatggaaaggaatggaattgcattgaatggactcgaatagaataaaatagaatggctctgaatgcaatggaacgtaatggaatagactccaatggaatgcaacgatatgggctcgaatggagtagaatggagttgaatggaaagtaacggaatggaatggagtggaatggaaaggaatggaatggtatggaatttaatggactcgaaacgaatgtaatgtaatggaatagaatagactagaatggaatagaatggaagggaattgaataaaatggaatggaatggaatggggtcgactagagttaaatgaaatggaatggaattgaatgcacttgaaaggaatggaatggaatcatctcgaatggaaaagaaacgaatggactctcatggaatggaatgcaatggaatggactcgaatggaatgcagtggaatggacacgaatggaatggaatggtatttaatagaatggaatcaaaaggaatgcaatggaatggaatttaatggaatggactcgaatggaaaaaatggaaagcactcgaatggaatggattggattcgaatggaatgaaacggactcgaaaggaaaggaatggagtgcaaccgaatggaatggaatgctatggaatggaatggactcgaaaggaatgggacataaggggatagaattaactcgaatggaatggaatgtaatggaatgaaataagctcgaaaggaatgcaatgcaatggactcgaatggaattgaatggaacgaaatggaatggaaagtaatggaatgcaatacaatggaatgcactcgaatggaatgcagttgaattgaagggaccagaaaggaatggaaaagaatggaatggagtggaatggaatggaatgcaatgcaatggactctgagggaatggaatggaatggactctaatggaatggaatggatggactcgaattgaatggaatggaatcgagtggaaaaaaaagaatggacccaaagggaatggaacggaatggagtggaatggattggaatggaatggaacacaatggagagaaatggaatggaattgaatgcactcgaatggaatagaacggaatgtctccgaatggaatggaagggaatggaaaggactcgaatggaatgcaatgaaatggactcgaatggaatgcaaagcacttgagaattgaatggaatcaaatggaatggattggagtgggatggaatggaatggaatggaatggaatggaatggaatggaatggattggaacggactcgtaagtgatggaatggaatgcaaaggaatggaatggaatgaaatggaatggaatgaggccgaatggaatggaatggaattgaatggatttgaaagtaatggaatggaatggaatggtttcgaatggaatggaatggactcgaatggagtggaacagattggactcgaatggaatggaatgaactcggttggaatggaatggaatggtattgactagagtggaatgccatggaatggaaagaaatgggctcaaatggaatggaaaggaatggaatgggctcaaatggaatggaattagatggaatcgagatgagtggaatggaacagtatggaatggaatggactaaaatggaatggaatggaatttactcgaaaggaatagaaaggaatggactcaaatggaatggaatggaaaggaatcgaactgaatggagtggaaaggactaatggaatggaacggaatggaatggaatggaatggaatggaatggaatggaatggactcaaattgaactgaacgtattggtatggagtggactcgaattgaatggaatgtagtggaaataattgaactcgaatggaatggcatggactcggaatccaatcgatttgaaagaaatggaatgaaatggaatggaatggaatggaatcaacccaagtggagaggaatggaaatgaatggaaaggactcgaatgaaatggaatgctgtggaatggactcgaatgctgtgcaatggaaaggaatagactcgaatggaatggaatggaatgaacacgaatggaatttaatggaatggaaaagaatggaatggagaggaaaggaatggaatggaataaaatggaatgaaagagaacggaatgaaatggaaagcaatgaaatgaaatggagaggaatggaataaaatgcaaagcaatggaatggaatggaatggaatggaatggaatggacgggaatcgaagggaatggaacggaaaggactcgaatgcaatggaatggactcgaatggaatagaatggaatagaatggactaaaatggaatagaatggaatttactggattgcaatctacagtaatgtactctaatggaatggaatggaatggactctaatggaatggaatggaatgcaatggacaaggatggaatggaatggaatggacacgaatggaatggattggaagggaatggaatggaatagaatggattggaatggaaaggacgtgaaaggaaaggaatcgaatggaatcgaatggcatggaatggacacgaaaggaacataattgaatggagtggacttgaaagtcctacaatggaattcaatgtaacagactctaatggaatggaaaggaatggactcgaatggaatataatagaaaaggcatgaatggaatggaatgcaatggaatggtctcaaatggaatggtatggaatggactcaaatgaaatggaatggaattgaattgacttgaaaggtatggaatggaatgcattggaatggacgcgaatggaatggactcaaaaggaatggaaagcaatggagtggactcgaatggaatttaatgggacacgaatggaattgaatggaatggacacaaatggaatggaatggaatggactcgaattgaattgaaaggaatggattgcactcaattggaatggaatttaatggattcgaaaggaatggaattgaatggactggaatggaatggattttaatggaatggactcaaatgcaatggaatggaatggattcgaatggaatgtattggactcaaacggaatggagtggaatggtctcgaatgaaatgcaatggaaatgaatggaatcgaatggaatggaatggaacagaatggaacgaactcgaatggaacggaatgtaacggaatgaaatggactcgaatggaacggaatggacacaaattgattggaatggaatggaatggaacggaatggaatggaatggaatggattggaatgcacccgaatggaatgcaacagaattgaatggacccgaaaggaatagaatggaatggaatggaaaggaatcgaatggaatttaatggaatggactcgaatagaatggaatgaaattgaatggtctcgaaatgaattgaatggaatgcaatggaatggactagaatggaatggaatggaatggaacagacacgaattgaacagattaaaattgattgggctcaattggattggaatggaattgcatggattctaattggaatggaatagaatggacaccaatggaatggaatgaaatggactggagtacaatggaaaggaaaggaattgaattgaatggaatggacttgaatgcaatggaatttaatggatccaaatgaaatggaatggaatgaaatggaatggaatggaaaggaatggaatggaatggactcaaaagtaatggaatggaatggaatccaaaggagtggaatggactcgaatgtaaagtaatggaacttaatgtaatggactcttctggagtggactcttatggagtgaactagaaaggaattgaatgtaatggattcaaattgaatagaatgaaatggaatggaatcgaatggaatagaatggaattcactcaaatggaaaagattggaaaggacacaaacggaatagaatggactggaattgaatggaatggaatggaatcaaatggaatgcagtggaaagaaatggactccaatacaatggagtgaaatggactctagtgtaatggaatggaattgaacggactcgaatggattggaatgtattggaatggagtggacacgaatgcaatggaatgtaatggaatcaaatggtatgaaatggaaaggaatgcactcgaatggaatggaatggaatggaatggaatggaatggaatggaaagaatggacttgaatggaatgtaatggaatggagttgtatggaatggaatggactcaaatggattcgaacggaatggaatggaatggaatggaatggaatggaatggaatggaatggaatggattggactcgaacggaaaggaggggaatggtttcgaatggaatggaatggaaatgaatggactcgaacggaatggaaagtaacggaatggaatgaactcgaatggaatggaatgtaacggaacgaaatggactcgaaagtaatggaatggaaaggaatggattcaaattgaatggaatggaatggaatggaatggattggaatggacacgaatggaatacaatagaattgaatggacacaaagaatggaatggaatggaagggaatggaagggaatcgaatggaattgaatggaatggactcgaatacaatggaatggaattgaatggtctcgaaatgaatggaaaggtatgcaatggaatggacccgaattgaatggaatgggatggaacggactctaattgaactgcagggaattgattggtctcaaatggaatggaatggattccaactgaatggaatggagtggaagggactcgaatggaatggaatgaacttgactgcaatagaatggaaaggactctaatgcaatggaatggacttgaatggaatggaatggacttgaatggaatggaatggagccgaatggaatggaatggaatggaatggaatggaatggaatggaatggaatggaaaggaatggaatggaaaggaaggtaatggaatggaatggattggaatgcaatgcactagaatggaatagaatagaatggaatggaaaagacaaaaaagtaatggaatggatttcaaataaatggaatggactcaaatgtaacggaatggaatttaacgaaatggacacttgtggagtgggatggaatggactcgaatggaatgggtttcaatggaatggactagaaaagaatggaatggaatggtttcaaattgaatagaacggaatcgaatggactagaatggaatgcaatggaatggaatggactcgaaaggaaaagaatgtaaaggactcaaatggaatagattagactagaattgagtagaatggaatggaatggaatggaattgacaccaatggaatggagtaaaatggactcgaatggaatggaatggaattgaagggactcgaatggattggaatgtgttggaatggagtggacacgaatggaatggaatataaaggaatcaaatggaatggaatggattggaatggaaaggaatgcactcgaatggaatggaatggaatggaatggaatataatggaatggaaagaatgcactttaatggaatggaatggaatggactcgaatggaacgaaaggaatggcctcgaatggactcgaacgtaatggaatgggatggaatggactggaatggaatggtatggaacggaatgaactcgaatggaatagaatggaagggactcaaatggaatggtgaggaaaggagtggactcgaatggaatagagtggaatggaatcaaatggaatggaatagaattgaatggagatgaatggaatggaattgaatggaatagaatgctctccaatggaatggaaaggaacggaatgaaatttactcaaatgaagtggaatggaatggaatggaatcgaaagaatggaatggaatggaatggaatggaatggaatggattctaatggaatgcaactgaactgaatggacgcgaaaggaatggaaatgaatggaatggaattgaatagactagaatggattggaatggaatggaatggaatcgactcgagtggaatggaaaacaatggatattaatgaaatgcaatggaaaggaatggtctcgaatggaatggaatggaatggaatggacctgaatggagtggaatggaatataatggaatggaatggatattaatggagtggaaacgaattgattcgaatgaagtggaatataacggaatggaatcgaatggaattgaatggaatggaatagactagaatggaatggaatggaatgcactcgaatggaatagaatggactcaaatggaatggattggaatggacccaaatggaatagaatggactggaatgtaatggaatggaagacaccaaatggaatgggatgggatggaatggaatggaatggaaaggagaggaatggaatggaaccgactcgaatggaatggaatggaatggactcgaatggaatggaaaggaatggaatggactcgaattaaatggaaaggaatggaatggatttgagtggaatagaatggaatggactcgaatgcaatagaatgcacttgaatgcaatggaatggaatggaatggacccgaatgaaatggaaaggaatggaatggatttgaatggaatagaacgaacttgaatggaatagaaaggaatggaatggaaaggatttgaaaggaacagaatggaatgaacttcaaaggaatggaatggactcgcatgcaatggaatggaatctaatggaatggacacttatggagcggaatggaatggactcgaatggaatgggtttgagtggaatggactagaaagtaatggaatggaatggattcaaatggaatagaatggaatggaatggacttgaatggaatggaatggaatggatacgaatagaattgaatggactccagtagaatggaattgaatgtaatggactcgaataaaatataatggaatagaatggaatggactcgaatggaatagaatggaaaggattcgaatggaatagactggactcgaattgaatagaatggaatgcactcaaatggaatggagtggaatggaatcgagtcgaatggaatggagagaaacagactcgaatggaatggaaaggaattgaatggactcgaatggactggaatgtgttggagtggaatggacacaaatgtaatggaatgtaatggaatcaaatggaacggaatggagtggaatggaaaagaatacactcgaatgcaatggaatagaatggactcgaatggaatggaatggaatggactcgaacgaaaagcaatttatttgaatggactccaaaggaatggaaccgaatgaaatggaaaggaatggaatggaatggaattaaatggaacggactcaaatggaatggagtgaacttgattggaatagaatggaatggactggactggaatggaatggaatggaatgcaatggaatggactcaaatagtattggatggaattgaatgcactcgaatggaatggaatggaatggactcgtgtggaaatggttttaatggattgcactagaaaggaatggaatggaaacgaatggaaagaaatggaatggacgagaacggaatggaatggactcgaaaagaatggaatggaatggaatggaagggactagaaaggaatagaatggaatgcaatggaatggactggtatggaatagaatggaatggactcgaatgtaatggaatggaatagactcgaaaggaatgagatggaattgaatggactcaaacggaatggaatggaaaagactcgaatgtaacaggttggaatggaatggactcgaatggaaaggaatgcaatggactcgaatggaatggaatggaatggactcggatggactcgaacgaactggaatgggatggaaaggaagcgaatggaatggaatggaatggaaagaattcgaatggaatacaatggagtggatggagagggaatgagtggtatcaaatgaaatggagtggaatggaagaaaatggaatggaatagaattgaatggagatgaatggagtggaatataacggaaaagaatggactggaatggaatggaatgaaatggaatgaaatttacccaaacggagtggaatggaatggaacggactcgaaaggaatggaatggagtggaatggaatggaatgcattctaatgaaatgcaactgaattgaatggactctaaagaaatggaaaggaatggaatggaatgcaattgactcgaatgaattggaatggaatggaatgaaatggaatggaatggaatggattgaatggaatggaattgagaggagtggaattgaatgggtttgaatggattggactcaaatggaatggaatagaaaagaatggattcaaatggaatagcatggaattgaatggactcgaatgcaatggaatggactggactcgaatggaaaggaatggactcgaatggcatggagtgggatgtactcaaatggaatggaaaggatttgaattgaatagaatgaaatggaacataacggaatggaatgaactacaatggtatggaatgtaaaggaaagaaaagaactagaaaggaatggaatggaaaggattggaatggaatggaatggagcagaatggaacggattggaatggaatggaaaggaatggactcaaatggggtggcatggaatggaatgaaatctaaaggaatggaatgttatggacacgaatggaatggaatggactcgaatgaaatggattggaatggaatggaatggaatgtactcgcatagaatagaatggaatggaatggactcgaaaggaatggaatggaatggacacgaattgaaaggaatttaacggaatggaatggaatggaatggaatggaaagcaatagaatggaaaagagtagcaaggaaaggaatggactttaatggaatagaatggaatggaatggaacggactcgaatgaaatggaaaggaattgacgtgaatggaatggaattgagtcaaaaggaatttaatgtaattgaatggactcgaatggaatggaatcaagtggaatggaatggaatggacttgaatgaattgaatcgaatggaatggactcgaattaaatagaatggaatggaatatgctcgaatggaatggacacgaatggaatggaatggagtggaatgcactggaatggaatggagtgcaatggaatggaatttacttcaatttaatagaagggaatggaatggaattgactcgaataaaatggaatggaatggactcgaatggaatggaatggacaagaatggaaaggaatgcaatggactcgaatggaatggaatggaatggaatggaatggatgcgactggaatggaatgaaatggaatggactcgaatagaatagagtagactggatttgaatgaaatagaatggaattgaatggactcacgtcaaacagagtgttatgctatggaacggactcgaatgtaatgtaatgtaatgaaatgaaagggattcgagtggaatggaatggactcgaatggaatacaatggaatggactgtatacgaatggactcaaatcgtatggaatggaaataaatggactttaaaagaatggaatggaatggaatagaatggaatggaatggactctaatggaatggaatggaatggaatggactccaaaggaaaacaacggactagaatggaatggaatggaatggaaattactcgagtggaatggcatggaattgaatggactcaaatggaatggagtggactcgaatggaatggaaaggattggacccaattggaatggaatggaatggaatagaatcgtatggactcaaatggagtggaatgttatggaatggaatgggcttgaatggaatagaatggaatggaaaggaacggatttcaaatgaatagtatggaatggaaatgaatggaattgaatgaacatgaaaggaacggaatggaatggaatggactcgaatttaataaaatgcaacttaaaggtaaggatcctactggaatggaatggaatgcactcaaatggaatagaatggaatagactcgaatggaatggaagggaatggactcaaaatgaaaggaatggacactaatggaacagaatggaatggaatggaattgactcgaatggaaatgaatggaatggacacgagtggaatgcaatggaatggactcgaatggaatggaatggaatggacacaaatggaatggaatggactcgagtggaatggaacgtaatggagtgaaatggacttgaatggaatggaatggaatggaatggaatggaatggaatggaatgtagtggactcaaatggaatggaatgcaatggaatggactcgaaaggaatggaatggtattgagtggactcgaaagcaatggaatggaattgacttgaaatgaatggaatgcactcgaaagaaatggaatgaaatggactcgattgcaacggaatggactcgaattcaatggactttaatgatatggagtcgaatgaaatggactaaataggaatggaattgaatggaatggaatcgaatggaatgaaaacgaatgtaatgtgttcggatggaatggaatcgaatggaatggtatgcaatggaatgcaatcaaatggaatggaattgaatagaaaggaatcaaatggattggaattgaatgcaaaggaatcaaacgaaaaacactggaatggaaatgaatcgaatggaatggaaaggactagaacggtttcaaatgtaaaagagtcgaatggaatggaatcgaatggaatgaaatcaaaaggaatggacttgaatggaaaggaatgaaatggcatggaagggaattgagtcgaatggaatggaatggaatggaatggaagggaatgatattgaatcgagtggaatggaatggaatcacatggaatagaatcaaaagcaatggaaaggaatggaatcgacttgaatggaatgaaatcaaatggaatggaatcaaatggaatgcgatagaatagaatgtaatggaatggaatagaattgaatggaatggaatgaaatgcaatggaatcgaacggaatggattgtactccaatgtaaagtactggaatggaatggacttgaatggaatggactcgaatggaaaggattcgaacggaatgggcccgaatgcagtggattcaaatggaatggtcttgaaaggaatgctatagagtggaatagaatcaaatgcaatggaatataaatgaaatggactgtaattgaagggactcaaaaaaatggactagaaaagaatggactcgaatggaattgaacacaatggaatggaatggaatggcataaaatggaatatactcgaatgtataggagtggaattgaatggaataaaatggaatgtacttgaatgtataggagtggaatgtaatggatgtgaatggaatcaacccgaatggaaagctatcgaatccaatggaatggactggaatggaaagcaaaggaattgattggactcgaatggaatggactggaatgatatagactcaaaagttttgtactcgaaaggaatggaatcaaaaggaatggaatccaatggaatggaaacttatgtaaggtattcgaatcgaatgaaatggaatcgaattgaaggggtatgaatggaatggaatggaatggaatcgaatcgaatttaatggaattgaataggaaagaatcaaatggaatggaatcaacccgagtggaatggaatggaatggaaaggaatggaatggaatggaatggaatggaatggaatggaatggaatggactccagtggaaaagactggaatggaacggtttcgaatgaaattgaatcgaatgaaatggaatggaatgcaatggaatcaaatggaatggacttgaatggaatggaatggaatggaatggaatggaatggaatggaatggaaaggaacagaatcaaattgaatcgaatggaatggaagggaatggaattgaatcacatggaattgaacggaatcaaatggaatatcatcaaatggaatggaaaggaaagtaatggaatggaatagaaaggaatgaaatccaatgcaatggcatgaaatggaatggaatcaaatggaaagggaaagaatggaatgaaatggaatggaatggaatggaaaggaaaggaatcatatggattagattcgaaaggaattgaaaggaatggaatggaatggaatggaatggaatcgaatggaatcgaatggaatcgaatgggtggaaattgaatggaatggcttcaaatggaatgggaaaaaatggaattggaaaaaatggaatggaacggaatggaatggaatgctatggaatggactcgaatgtaaaggactggaaaggaatggactcgaattgtaaagacacaaatggaatggaaactattggagtggaatcaaaaagactggaatcgaatggaaagggattgaatggaattgaatggaatggaaaggattggaatagaaaggaatggaatggaatggaatggaatggaatggaatggaatggaatggaatggaatggaatggaatagaatggaatgtgctcgaataaaaagactagaatgcaatggacttgaatggaatggactcgaatggaaaagatttaaaaggaattaacacaaatggaatggattcaaacgaaatgtctcgaaaggaatgctatcgtgtggaatggaatcaaataggatggaattcaatggaatggactgtaactgaatggactcaaaaggaatggactcgaatggagtggactcaaatggaacggaagtgaatggaaaggaatcgaatagaatatactcgaatataaggaagggaatgaaatggacttaagtggaattgacttgaatggaatgaaattgaataaagtggaatggaaatgaatggaaaggaatggaatggaatggaatggactgtaatgcaatggactcgaatgtaaagggctggaatggaaaggactcaaatggaatggaatcgaatggaatggactcaaatgcgtccatttgaggaatcgaatggcatggaatcgaatagaatggaaccgactggaatggaatggaatggaaaggaagggaatggaaagggatctaatgtaatggcatggaatggaatggaatggaatggaatagaattgaatggaatggaatgtactcgaatgtaaaggactggaatggaatggacttgaatggaatggacttgaatggaaaggattttaatgcagtggactagaatggaatggattcaaatcgaatggtattgaatggaatgctatacagtgtaatggaatcaaatgggatagaatcaaatggactgcactgtaatagaatggattcgaaaggaatggactcgaatggaatggactccagtggagttggaaaggaatgtaatgtaatggaatggaatgaactcgaatgttaaggactggaatggagtggactggaatggaattgactcgaatggaacgcaatcaaatggaatggaatggaaaggaatggaatggaaaggaatggaatggaatggactgtaatggaatggaatagaaaggattgtactacaatggaatggactcgaatagaatggaatcaaatggaatggattcgaatataatggaatggaatggaatggaatgatacggaatgaaatggaatggactcaaaaggaatggactggaataacatggactcgaacgtaatggactcaaaaaaaatggaattaaatgaaaagaaatcgaatgcaatggaattgaatgcaatggactggaatggaatagacttgaatagaatgcaatcaaatagaatggaaacgaatagaacggatacgaatggaatggaaaggaatcaaatgaaatggaatcaattagaatggaatgggatggaatgggatggaatggaatggaatggaatggaatggaatggaatggaatggaatgcaatggaatggactcaaatgtaaaggattggaatggaaaggactcgaatggaaagcactcgaatggaatggactcatattgaaaggaatcaaatggaatggaatgcactcgaatgtaaaggactgcaatggaataaactcgaatcgaatgtactcaaatggaaatgatgtgcatggaatggagtcgaatggaatggattcaaatggagtggtctcaaaaggaatgctatcgtgtggaatggaatcaagttggatggaatcaaaggaaaggactgtaaaggaaatgagtcaaaaggaatgtagtcgaatggaatggacttcaatggaatggaacagaatgcagtggaatggaatggaatgtattcgaatgtaaaggactgcaatgtaattgacttgaatggaattgactcaaatggaatgcaatggaatggaatggaatggaatggagtggaatagaatcaaataggaatggaatggaattgaatggaattgactctaatggaattgattcgaaaggagtggactcgaatggaatggactcgaaaggaatgcaattgaatgcaatggaaatgaatggaatggagtagaatgctatggacgaaaattgaatggaacggaatgaagtggactcgaatggaatggactggaatgataagcactcgaatggaatgtacttgaatggaatggagttgaataaaatcgaatggaatgcaatagaatgaaatcgaatggaatggaattgaatagaatagaatcaaatggaaaggaataaaatgcaatggaatcgaatggaatggaatggaatggaatagaatgtaatcgaaaggaattgaatcgaatggaatggattcgaatggaatggaatagtatcgaacggaatggaatcaagtggaatggaatgggatggaatggactggaatgaaatggaatggaatggactcgaatgtaaagggctggaatggtaagaactcgaatggaatggactcgaatggaatggacttgaatgtaaaagcctggaatggaaaggactcgaatggaatgaactcgaaagtaatggactcaaatggaatgaaatcgaatggaatggaatcgaatggaatggaattgaatggaagggaatgggattgaatggaatggcatagaaggtaatggagtggaacggaatggtatttaatggaatggaatggaatcgaattgaatggaatggaatggacacgaatgaaagactggaatagaaaacacttgaacggaatggacttgaatgtaaatgattcaaatgcaagggactcgaaaggaatggattcaaatggaatggtctcgaatggaatgctgtagtgtggaatggaatcaaataggatggaatagaatggaatggactctaatggaatgcagtcgaaaggaattgacatgaatggaatagactcgattggaatggaatggaatggaatggaatggaatgtactataatataaaggactggaatggaatggagttgaatggaattgactcaaatggaatgtaatcaaatggaatgcaatggaaacgaacggaatgcaatggaatggaattgaatggactgtaatggaatggactcgaatggaatggattcgactggaaaggactcgaatagaatgcaatcgaatggaatggaattgaatagaaagaaatcgaatggaatgtaatcaaaaggaatttacaggaatgatatggaacggaatagaatggactaaaatggaatggacaggaatgatatcgacttgaatgggatagatttgaaaggaatggaatcgaatggaatggaatagaatagaatgaaatcgaatggaagtgatacgaattgaatggaatggaatcgaacggaatgggttcgaatggaatggaattgaatagaacggaatggaatggaatgggatccaatggaatagaattgaatagaatggaatcaatcggagtggaatcgaatacaatggaatggaatgcagagactggaatggaatggactcgaatggattgtaattgaatggaatggattctaatggataggaatggaatcgaaaggaatggaatcaaatggaatagattgggatggaatggaatgcaatggaatgggatggaatggaatggaatggactcaaacgtaaagaactagagtggaaaagactcaaatgcaatgtactcaaatagaattgactcaaatggaatggaatcgaatggaatggaatcgactggaatggaaaggaatggaaggaactggaatggaatggaatcgaatcaaatcaaatgtaatggaatgtacgagtatggaaaggactggaatcgaatcaatataaaaggaatggacttgaatggaacggatttgaatggaatggactcgaatggaatagattcaaaaggaatggtctcgaatgtaatgctattgagtggaatggaattaaatgggaaggaattgaaaggaatggaatcgtacggaatggaatcgaatggaatggaatgaaatagaatgtattacactggaatggaatggaatggactgcaatggaatggaatcgaatggaatgtactcgaagtgaatggaatggaatcaacaggaatggaatggaacggaatgaaatagaatgaaatggaatggactcaaatggaatggactcgaatggaatgaactcgaaagaaatggacacgattggaatggatttgaatggaatgcaatcgaacagaaagcaatcgaatggaatggaattgaatgggatggaatcgaatggaatggaatcaactggaatggagtcgtgtgaattccaatggaatagaatggactggaatcgaatggagtggaatggaaagatctcgaaattaatagaatggagtggattggaatgaaatagaatcgaatggaatgatctggagtggaatggattggaatggaatgtagtctaaagaatggactcgaaaggaatgcaatcaaatggaatggaatcgaatggaatggaatcgaatggaatggaatggaatgaacttgaatggactggaatgaaatggagtcaaaagaatggactcgaaaggaatgcaatcaaatggaatggaatgaaatggaatggaatcgaatagaatggattggaatggaatggaatcgaatggaatggaatcgaatgaaatggaatttaatggaatggaattgaatggaatggaagccaaaggaaaggaatcaaatgtcatggaatggaatggaacggtctcgaaaggaatggaatcgtatgcaatcaaaccaatcaaaggcaaagcaatggattggaatataatggaatggaatgcaaaggaattgcatcgaatggattggaatgcaatggaatggaatggaaggcaatggaaacgagtggagtggaatcaaatggaatggaagggattggaatggactggaatggaatggaatggaatgcaatggactagaatgtaatggactggaatggattagactcaaatggaatggtatgtaattgaatggacacgaatggaatggaaatgaatggaatggaatagaatggactgcaatcaaattgaatagaatggaatcgaatagaatggaaccaagtgaaatgcaatttaatggaatggaatggaatggaatggaatggaatggaatggaacggaatggagtggaatggaattgaatataatgcaatcgaaaggaatggaatagaatggaatggaatcgagttcaatggaatccaatatactgcaatggaattgaatggaatagaatggaatggaagggaatggaatggaatggaatcaaaaggaagggaacgaatggaatggagtggaatggaatggaatggaatataatggaatggaacggaatgcaatggaatggaatttaaccgaatggaatggaatagaatgggattgactgtaatggaatgaatggaatggaatgcactcgaatgtaaaggaagggaatggaagggaatggaatggaacagactctaatataatggaagaaaagtgaatggaatggaatgcaatggactgtaatggaaggaatggaattgaatggactcgaacgtaattgactgaaatggaatggaatcgaatggaatgaattgaaatggaatagaatggaaaggacaaaagtggaatggaaaggaatggactgtaatggaaggaatggaatggaatgcacacgaatgtaactggaatggaatggaatcaaatggaatggacaggaatggaattaaatggaatggaatggaatggattggaatggaatgaaatggaatggaatggaatggaatagaaaggaatggaatggaatgggattgaatggaatggaatggaatggaatagaaaagaatggaatggaatgggattgaatggaatggaatggaatagactggaatggaacggaacggaatggaatggaattcaattgaatggaaaggaatggagtgaactgtaatggaaggaatggaatggaatgcactcgaatgtcattgactggaatggaatggactcgtatggaatggactggaattgaatggaatggaatggacagtaatggaagaaattgaatggaatggactcaaacggaaaggactcaaacggagtggactcgaattgaaaggatgtgaatggaatggactcgattattgtggattcgaatgcaatggactcgaatggaatgcaatcaaaaggaacagattcgaatggaatggaatagaaaggaatggacacgaatggaatggagtagaatagaatagactcaaatggaatggactggaatggaatggaatcaaatggaatggaatggaatcgaatggaacggcatggaattgaatgtgatggaatcgaatggattgaaatcaaatggaatggactggaatggaatggaatcgaatggaaaggactcaaatgcaatggactcgaatggaatggaatcacatgggatggaatcgaatagaatggaatgcagtggaacggagtcaaaaggaatggactcgaatggaaggaactcgataggaatggaatggattggaatgggatagaatgtaatggactctaatgtaatgaactggaatgaaatggacttcagtggaatggactcgaatggaatgcaatggaatggaatggactctgtttgaatggacatgaatggaatgcaatcgaaaggaatgaaattgaagtgtaaggaatcaaatggaatggacaggagtggaatgcactggaatgtaatggactcgaatggaatgaactggaatgatatggactccaatggaatggactcgaaaggaattgaatagaatgcagtgaaatagaatgcattggaatggaatcgaatggaatggagtccaatacagtggaatcgaatggaatggaatcgaatggaatggagtcgaaagtaatggactggaatggaacggtcttgaatggaatggaatcaaattgaatggaacctaatgtatcggactcgaaaggaatggactggaatggaatggaatcaaatggaattgactcaaatggaacggaattgaatggaatggaatcgaaaggaaaggaatggaatggaattgaatcgaatcgaaaggaatggagtggaatggaatagaattgaattgaatggaatggaatggaaacaaatggaatgtaatcgaacagaatggaatggaaaggaatgcaatggaatcgaaaggaaagaaatcaaatggaatggaattgaatggaatggagtcaaatggaatgtattctaatggaatggaatcaaatggcatgtgatggaatggaatggaatcgaaaggaatggaatggaatgcaatgcattcaaattgaaagggatcaaatgaaatggaaagaatggaatttaatcgaactgaatggaatagaatggtatcgaatggattcgaatggcttgtggtgaaatggattggaatgggttggaatggaatgggttggaaatgaattgaatgtagtgtagtggagtggagtggatggagtataagggaatggaaagggaaagaatgtaattgaacagactggattggaaaggagtggaatataatagaatggaatgtaacggaatggaatggaatgcaatggaatggtatggagtgaaatggatttcttggagtgaaataaaatggaatgaagttggatggaatgcagtgaattggggtagactgtagtggaatggaatggaatgcagtggaatggaatggactcgaaaagaaagaacacgaatggaatggaatggacactaatggaaaggaagggaataaaaaggaatggagtggaatggaatagaatggaatggaatggaattgaacagaatggaatcgaatggaatggaatcgaatagaatggaacagaatggaatgaaatggaatgtatttcaatagaatagacagatatggaatggaatcaaaacaatgggaatggaatggactcgaatgaaactgaatcaaaagaaatcgaatggaatggaatagaatagaacaaaatggactcgaatggaatggactgcaacggaatcgaatcgaatggaatggacacgaatggaatggactagaatgcaatgggtttgaatggattggaatccaaaggaataccctagaacgtaatgtaattgaatggaatggaatcgaatggaatggactggattggaatggaaaggattcaaatggaatcgattcaattggaatggattcgaacggaatgcaatcgaatggagtggaatcaaatggaatggaatcgaatggaatggaatagaatggaatggaatcccatagattggaatcaaatggaagggaacggaagggaatggaatggactcaaatgtaatggaaaggaatgcaatcgagtggaatggaatggaatggattggaatggaatggaatggaaagaatggaatgtaacggacacaaatgtaatggactggcatggaacagactcgaatggaatggattgaaatgaaaaagaatggaatgaaatggaattgcatggaatggaatagaaaggaatggaatagaatagactcaaatgtaatgaactggaatgaaaaggaatggaatggaacatactctaatagaatggaatagaatggaactgaatggaatgcaacggaatgaaatggaatggaacggagtggaattgaataaaatggaatggaatggactcgaatggaatggaattgaatggaatggaatgtaactgaatagaacgacattgaatggaatggaaaggtaccgaatggaaaggaatgggatggaatgggatggaatggaatggaatggaatggaatggaatggaatggagtcgaatggaatggaatggaataaaatggagtggcatggaatggaatagaatggaatgaaatgaaatggagtggcatggaatggaatagaatggaatggaatgaaatggagtggaatggaaggaatggaatcgaatagaatggagtgtaattgaatggaatggaaaggaacggaatcaaacagaatggaatggaacggaatggactgtaatggaattgcacgtaatcaaaccgaatggaatggaatggaatgaactcaattgaaatggattcgaatggaatggactcgaatgtaatgcaatcgaatggaatggaatcaaatggaaaggaatagattggaatagaatcgaacggaatggaatgcaatggaatggaatggaatggaatggaatggaatggagtggaatagaacgaaatggaatggaatggaaaggacccaaatgcaatggaatggaattcaatataacgaaatagaatggaatggaaatgacccaaatggaatggaattgaatggaatgaaattgaatggaatagaatggaatggaatggaatggaatggaatggaatggaatggaatggaatggaatggattgtaatagaatcgcatagattggaatggaatggaatggactgtattggaatgcattcgaatggaatgaactcaaatggaatggaatggaatagaatggaaggaaatcaaatggaatggaggcgaatggaatggacccgaatggaatggagtcgaaagcaatggactggaatggaatggaatcgaatggaagggattagaatggaaaagaattcaatggaagacaataaaaaatactgggctggaattgaacgtactggaatggaatggaatagaatggaagggaatcgaatggaattgaaaggactagagtggaatggattcgaatgcaatggactcgaatggaatgcagtcaaatggaatggaatctaatggaatgcagtcaagtgcaatggaacagaatggaatggactcgaatggaatggacttgaacgcaatggactggaatggaatggaatctaacggaaaggaatcgaacggaatggaattgaatttaatggaatggaatcgaatgtaattgaatggaggggacaggaagtgaatggtatcgaacggtatagaatggaatggaagtcaatggaatgcaattgattggaatggaatcaaatggaagggaattgaaaggaattgaatcaaatggaatcgaatggaatggtaagcaatggaatggaatggaatgtactcaaatggaatggactggaattgaacggtctcaaatggaatgaaatggaatccattgaaatggaatggaatgcaatagaatggaatggactccaacggattagactggaagggaatggactcaaatggacaggaatcaaacggaatgaaataaaatggaatggaatggaatggaacagaatcgaatgaaatggaatttaatggaatggaatagaatggactggaaaggaatggattggaatggaatggaatggaatggaatggaatggaatggaaaggaatggaattgaaaggaatggaatggaatggaatggtatgaaatggaacggaatgcaatggattcaaacagaatggatcggaatgaaatgaactggaatggaatgggctgcagtggaatggaatggaatggaattgatttaaactgaatggaatgatgtagaacggactcaaacggaatggattcgaatggaatggaatggactcgaaggaaatggactggaatggaatggattcgaacagaatggatcggaattgaatagaatgtaatgtaatcaaacggaatggaatggaatgaatggaattgaatgaaatggaatggaatggaattgatttgaacggaatggaatggagttgaatggactcgaacggaatgcatttgaaaagaatggaatggattcgaagggaatggactggaatggaatggattcgaacagaatggattggaattgaatcaaatgtaatggaatctaacagaatggaatggaatgaacggaattcaatcgaaaggaatggaatggattcgaacggaatggaatgaaatgcaatcaaaaggaatggaatgaaatcgaatgaaattgaatggagtgcaatcgaatggagttgaatggaattgaatgaaaaggattcgaacggaatggaatggaatagaatggcatggaatggaatagaattgcatggaatgcaatgctctctaatggaatggaatgaaatggaatggaactgaccctaatgtaatggaatctaaagaatggaatacaatggagtagaattgaatggaatggaatctaatggaatggaatggaatggtatggaatcaaatggaatggaatggcatggacaggaacagaatgtactggaatggaatggaatggtatggaatcaaatggaatggaatggcatggacaggaacagaatgtactggaatggaatggaatggaatggaataatatggaaaagaatggaatcgaatggaatggaatggaatggattcgaatgaactggaatggaatggaatggattcgtatggaatttaatgaaatggaatggaatggaatggaatctaacggaatgcaatggagtggcaaacaatcgaatggaatggaatggagtggaatgaatggaatggaatggcatgaaaaagattagaatgaatggactggaaaggaatagaatggaatggaacgaaatgtcctcgaatgtaatcgaatggaattgaatggactccagtggaatggactcaattggaagggactagaaaggaatgaatttgaatggaatggaatcgaatgtaatagaatgaaatggaatagaatcgaatggaatggaattgaatggaatggaatgaaatggaatgtaatggaatcaaattgaatgcactggaatggaaaggacttgactgcaatgcactcaaatggaatggaatcgaatggaatgggatcgaatggaaagggatcaaaagaaatgcaatcgaatggaatggaatcgagcggaacggaactgaatagaaaggaatggaatgaaatggactcgaaaggaatggaatggagtggaatggtcttcaatggaatggcatcgaatggaatgcagttgaatgtaatggaatcgaatgtaatggaatcaaatggaatggaaaggactggaacggaagggcatggactggaatataattgactggattggaatggacacgaatgtaattgaaacaaatggaatggaatctcacggaatggaatcatatgtaatggagaagaatggaattcactggaatggaaaggtttcgaacggaatggaatcgaatggaaaggattggaaaggaatggaatagaatggaatggaatggaaaagaatggaatgcactggaatggaaaggtctcgaatggaatagaatggaaaagaatggaaggcactggaaaggaaaggtctcgaatggaatggaatggaatggaaaggattggaatggaatggaatggaatggaatagaaacgaatggaatggattggactggaatggaaaggactagatggaatggactgcaacggattagactcaaaaggaatggactcgaaagaatggcatcaaatggaatggaatggaatggaattgactggaacggaatggaaatgactcgaatagaattgaatcaaatggaatggactggaatggaaaggaatggactcgaatggaatggactggaatggaatggtctcgaatggaatggaatcgaatggaatggacttgagtagaatggaatggaatggaacagtctcgaattgagtggaattgagtggaatggaatcgaatggaatggaataaaatggaatggaatggaatagaatggaacagaatcaaatggaatggaatggaatggaatggaatttactcgagtgtaatatagtggaatcgaaaggactcgaatggaagggactcaaacgccatggaatcgaatggaatggaatcgaatagaatggaatgcaatgaaatggaatcgaatggaatttaatggaatggactggaatggaatgtactcgaatggaatagaatcaaatggaatggaagagaatggaatgaaattgattcaaaaagaatagattggaatggaataaaatcgaatggaatggaatggaacggaatggaatagaatggaatggaatggaaaggaatagaatgtaatggattggaatggactccaatgtaacggactggaatagaatggactcaaatggagtggactctaatggaatggactctagaggaatggaatgcaatagaatggaatggaatgaaatggaatggaatggactggaatggaatggactcgaatagaatggacttcattggaatggacccaaagggaatgcaatcgaacagaatggaatagaatggaatggattcgaatggaatggactggaatggaatgtatttgaatggaatgtactggaatggaatggtcttgaatggaatagaatcggaaggaatgcaatataatggaattgaaaggaatgcaatggaatagaattgaaacaaaaggaatggaatcaaatggaaacaaatggaatggaatggaatggaatcgaatggaatgtagtggaatggaatggaatcgatttgaatggactcgaatgaaatggaatcaaatgcaatggaatcgagtaaaatgagatcaaatggaatgggatggaatggaatggaatagagtggaacggagtcgaatgtaatggaagcgatcggaaaggaatcaaatggcaacaaatggaatcgaatggattcagatgcagcggagtggagaggaatgcagtggaattgaattggttggattggaattgaatgtagtggagtggagtggagtggagtggaatgaaatgtatggaatgaaataaaatggaatggaatgaaatggaatcgtatgaaatcgaaaggaattgaattgaaaggcatggaatcaaaccgaattgaatggaatcgaatgtattggaatgtaatagaatggaatcgaatggaatggactaaaaatgaatgcatcagaatggaaaggtctcgaatggaatggaacggaattgaatgaaatcgaaaggaatggcatcgaatggaaaggaatggaatggaatggactcaaatgcaatctactaaaatagaaaggactcgaatggaatggagtcgaatggagtggaatcgaatgcaatggaatcgaatggaagggaatacaatggatttgaatggaatggaatggaatggaatggaacggacttgaatgtaatttactcgaatggaatgaaatcgaatgaaatggaatcaaaacgaatgaaatagaatggaatataatggaatggaatggaatggaatggactgaaatggaatggactcgaacagaattgtcttgaatggaatggtaacgaagggaagggaatagaatggattggaatggtatggaatgcaatcaaatggaatgcattcgaacggaatggaatggaatagaatggaattgaatggaatgcaatggactcaaatggaatggaatggaatgggctcaaatggaagggaatcgaatggaatcaaatcgaatggaatggatttgaatggaatcgaatggaatggaatggacaggagcagaatggaattgaatggaaaggaaatgtatggaatggaatggaatggattggaatggaatggactcgaatggaaaagaatggaatggaatggaaacgaatggaatggactttaatggaatgcagtctaatggaatggactggaatggaatggactcaaaaggaatggactggaatggaatggcttgaatggaatggaatcgaatagatcagaataaaatggaatggaatggaatggaatggaattgaatggaattgaatgcaatggaatggaatggaacggactcgaatggaagggaatcaaaaaaaatggaatggacaggactggaatggaatggacccgtaaggaatggactggaatggaacggctcaaatggaagggaatacaatggaattgaattgactggaatggaaaagagtccactcgaatgtaatggactggaatggaatggactcgaatggaatgggatcaaatggaatggcattgaatggaatttaattgaattgaatggattgaaatggttcaatctcgaatggaatggaatggaatggattcgaatggattggacacgacggaataaaatcgaaaggaatggaatggaatagaatagaatggaatggacttgaatataatggccaggaattgaattgactcgaatggaatgaaatcgagtcaaatggaattgaaacgaatgaaatttagtgaaatataatggaatggaatggacttgaatggaacggactgcaatggaatggactgaaatggaatggactcgaatggaattgtcttgaatgaaattgtaacgaacggaatggaatagaatgaattggaatggtatggaaagcaacggaatggaatggattcgaatggaatggaatggaatagaatgtaattgaatggaatgaaatggactcgaatgtaatagaatggaatggaatggactcgaatggaatggaatcagatggaatcaaatcgaatggaacggatttgaatagaatcaaaaggaatagaatgcaatggaatggacaggaagagaatgaaatcgaatggaatggaatggtatggaatggaatggattggaatggtatggactcgaatggcatggactcgaatggaatggaatccattggaatatactctaaaggaataaaatcgaatggaatggacaggaattcaatggactgaaaaggaatggacttgaatggaacggtctcgaatggaagagaatcaaatggaatagaattcaaaggaatggaatggaatggaatggaatcgaatcgaatggaatggaatggactggaatggaacggaatggagtggaatagaacggaatggactcgaatgtaatggactggaaacgcatggactcgaatggaatgcaatcaaacggaatgtaattgaatggaatggaatataatggaatgagaacaaatcaaatgaacacgaatggaatggactggaatggaactgtcttgaatggaatagaatggaatggtatggaatcgaatggaatggaatggaatggagtggaagggaaaggaatggaatagaacggaatcgacaagaatggaatggactggaacggaatggaatggaagtgaaaggaatggactcgaatggaatggacccgaaaggaaaggaatcatatggaatggaatcgaatggaatggaatcaaatggaatggaatggtttccaatggaaaggaacggaatgaactcgaaaggaagggaatggaatggaatggaacggaaagaactggaatggaatggcctcgaaaggaatggaatggaatggtatgatctcgaatggaaaggaaacgaatggaattgaatagactggaatggaaaggaatggaatcgaatgtaatggactggaatggaatggactcgaatggaatgaaatcgaatgaatagaatcgaatggaatggaatcgaatggaattgacacaaattgaatggattagaatggaatggcctcaactggagcataatgtaacggaatggaatggaacagaatggaatagaatgcaatggaacagaatagaacggaatggaattgaaaggaatggattgcaatggaatgcactcgattggaatgggcacgaatggaatggtatcgaatggaatggaatcaaatggaatggattgaatggaatgggatcgaatgaattggaatcgaatgttatggaatcgaatggaatggaatctaatcgaatgaaatggaatggaatggaatggaatgcaatggaatggaatggaatggaatgcaatgcaatggaatgcaatggaatggaatggaatgcaatggaatggaatggaatggaatggaatggaatggaatggaatggaatggaatgcaatggaatggaatggaatggaatggaatggaatgcaatggaatggaatggaatgcaatggaatggaatggaatggaatggaatggaatggaatggaatggaatgcaatggaatggaatggaatgcaatggaatggaatggaatggaatgcaatggaatggaatggaatggaatgcaatggaatggaatggaatggaatggaatggaatggaatggaatggaatggaatgcaatggaatggaatggaatgcaatggaatggaatggaatggaatggaatgcaatggaatggaatggaatagcctctaatggaatggaagtgagtcgaatggaatggaatggaatggaatggaatgcactgaaatggaatttaatggaatggaatttaatggaatagaatggaatggaatcaactaaaatgcaatggaatggaatggaacggaattgaatggaatggaatggaaccgaatggaataaaagggcatgcaatggaatcaaaagtagtgttatagaatggaatggaatgaaatagaatggaatggaatcaaaaggaataaaagggcatgcaatggaatcaaaagcagagaaatagaatggaatagaatggaatacaatgaaatagaatggaatggaatggaatggattcaagtggaatggaatgaaatggtttggattcgaattgaagggactggaatggaatgtattcgaatggaatggaatggaacggaatggaatgaactggagtggactcgaatgtaatggactggaatggaatggactcaaataaatggacttgaatggaatggactcgcatggaatggaatcgaatgaaatttaatggaatggaatagaatggaatggaatgtactcgaatgtaatggactggaaccgtacgtatgtaatggaaaggaatggaatggactcgaatgaaatggaatggaatggaatgaactggaatggaatggactcgaatggaatggactccattggaatggacccgaaaggaatgcaatcgaatgaaatggaatcaaacggaatggattcgaaaggaatggactggaatggaatggattcgaatggaatgtactggaatggaactgtcacaaatgtaatggaatcgaaaggaatgcaatggaatggaagcaaatggaatcgaatggaatggaatggaatcgaatggaatgtactggattgcaatggactcgattggaatggaatcgaatgcaatggaattgaataaaatgggatcgaatggaatgggatcaaatggaaagaaatcaaatggaatggaatcgaatggaatggaacggaacataatgaaatcaaatggcatcgaatggaatcgagtggattgtggtgaatggagtgcagtagagtggaatggaatgtgttggaatggaattgaatgtagtggagtggagtggagtggaatggaatggaatggaaaggaatggaatcgaatggaattgaatcgaatggaatggaatcaaatcatactgaatggaattgaatggaatggaatcgattcgattggaatgtaatagaatggaatcgaatggaatggactcgaattgaatggattggaatggaatggtatcgaatggaatggaatggaatggaatcgaatggaatggaattgaatggaatggaatcaaatggaattgaatggaatgcaatggaatagaatggaatggaatggactcgaatgcaatggagcggaattgtattgactcgaatgtaatggaatcaaatggaatcgactcgaacggaatgcaatcgaatggaatggaatcgaatggaaaggaatcgattggaatggactagaatggaatggactcgaatgaaacggactccaattgaatggactcgaatggaaagcaatcgaatggaatggaattgaatggaatggaatggagtcgaacttaatggaatcaaattgaatggactcgaatgtaatggactggaatggaaccgtacgtatgtaatggaaaggaatggaatcgattggaatggactagaatggaattgactcgaatgaaatgtactccaatggaatagactcgaatggaaggcaatcgaatggaatgtattggattcgaatggcatgtaatcaaaaggaatggaatggaatggaatcgaatgaaatgcaatggaatagaatggtatggaattgaatagaatggaatggaataggaatggactcgaatttaaaggaatggaatggtaaggactcaaattgaaaagactcgaatggaatggaatcgaatagaattgaatcgaatggaattgaaccttgtggaatggaattgaaacgaatggaatggaattcaattaaatggaatggaatggaatggactcgaatggaatggaattgaatgctatacactggaatgaaatggactcgagtagaatggcctgaaatggaatgtattcgagtggaatggactcgaacagaatagattcgaatggaatggacttgaaaggaatacaaccgaggggtatggattcaaatgggatggaatcgaatggaatggactgtaatggaatggacttgaaaggaacaaactcgaagggaatggactcgaatggaatggaatggaatggaaaggattcgaatggaatggaatggaatggaatggaatggaatggaatggaattaacttgaatggaatgcaatccaatggaatgcaatggaatggaacagaatgcaatggaatgtaatggaatggacttgaatggaatggatttgaatggaatggaatcgggtgtaatggaaacaaaagaaaggaatttgaaactaatataatggaatcgaatagaatgggttcgaataaaacgcaatcgaatggaatggaaaggattgcaatggaatggaatctaatggaatggaatcgaatagaatggaattgaatgaaatgaaatcgaatggaattgaatggaatggactgcaatgcaattgaatcgaatggaatggactggaatggaatggtctcttggaatggaataaaatggaatggatttgaatggaattgaatggaatgcaatgaaatgaaatcgaatgtaatggaatcgaatgtaatggaattgaacgaaatggaatagaattgaatggactggaatggaatggactcgaaggtaatggactggaatggaacggtctcgattggaatggaatcgaatggaatggattcgaatggaaaagaatcgaatggaatggaatccaatggaatggtctcgcatggaaaggaatggaatcgaatcaaatcgaatagaatgggtttgaatggaatgtaatcaaatggaataagatagaatgtaatgaaatcaaatggaacaaattcgaatggaatggaattgaatggaatggactggaatgcaatggactcgaatggaatggactggaatggaatggtctcgaatggaatggaatcgaatgacatggaatcgaatggcatggaattgaatgcagtgtaatggaatcgaagggaatggaattgaagagaatggaatagaatggaatggaatcgaatgcaatggaatcaaatggaatggattggagaggaatggactagaatggaatggactggagttgaacggtctcgaatggaatggaatgcaataaaatggaatcaaatggaatggcatggtatgcaatggaacggaatgaaataaaatggaatagaatggaatttaatggaatggagtggaaaggaatcgaattgattggacaggaaaggaatggagtggagtggaatggagtggagtggaaaggaatggagtgtagtggaatacaatgtaataagaagcaaataaatggagctgccaagagcccattcatggctcagtaaatctcaaattgtacactgagttgtccaagaaacgtggcacaccctgcagggccaaattaattatccctttctcggaacatcatgctctgattatgttaatacctgcaggtagatcccaagctttgtgtggcatcgccctgggggtcaagagagaaactgcatgttcttaccacatcctaaactgaaaagaacagtttagaaatgtggcaaatagaagagcttgttatcaggtgatcaatgacattaggtctgacttcagtcagctgcagaattttggcaagtgatatcaatctgaagcctctgaaatacacaggaacttctcaaaaaatctgccatactaagacaatatatggctgttagtgttggtgagaaggttttcagagttaaaatatttccgtgcaagctgcctcatgccccaaacactgcttttgccccagttacctacccaacaaattttatttttgatttagaaaataattaaaatagataggtgaactccaaaatttaacaatcagaaagtgacttatttgatatagtgatatcagcaagatggtggaatagggagtcttagctctcattctctcacacaaacagagatctgacaatgatataggtaacaaaatatctttatgagaagtccagaatctcattgaggattttcagaacatcagcaagatggccgaccaggagctgctagctaaagcagagcacaggagaacagcaaagaagcagcagaaatcccatagaccacagcaacccaggatgaccacaaacaaaaggtaaggaaacaccttgcctccaccacacccttccccaagttgagacccagctctgagctgtgatggaaaagttaagcaaggggaccccagcaacactcatcactattacaaacacttctgcagtcctcaaaggctctgagtcccgttgagggaagtccctagactccatatgctgagctacccccagagaaggagcccacactgtgctccaccgaactcactcctggtttgtgctgctacctccttgtgccatcttgaagctagaaccactgctagagtgcttcctactctgggagtgagtagcatttgcatccctccatccctgaggttcagccgccactgcaccatgcccacctggtagtgtgccatcctcgagcagagctgctgctatgaccttctccctagggccaagctatcagttagccacttatcctccacatccaagtcgctggtgcaccctcaccttagggccagctccttgagctctgggtccctgggggtaaggcaccacttcactccaagaatactacccagcaaagctgccttcagaaatgaaagagaaataaagtctttcattagacaagaaaaagctgaaggaatcaattaccactagatctgtcttacaagaagtgcttaagagagttctttaactggaaacaaaaggacaataatgactatcataaatacatgtgaaagtataaaactcattggtagaggtaaatacatagtcaaattcagaatactccaataatgcaatagtggtaggtaaatcatacataacactagtatgaagattaaaagtcaaaatggtcaaaaataatgtcaagggacaaagtttcaataaattttcagatctaaattggctttattgcaattctagcatcaaataacacttcatttcataaaatagaataagtgttctgatgaactgagcagaaatgtttggccttgtagaaagagaagggctgaagaaagcagaagcaaaggccaggcacggtggctcaagcctgtaatcccagcactttgggaggccgaggcaggtgaaatcaccagaggttaggagtttgagaccagcctggccaacatggagaaaccctgaaaccctgtctctatgaaaaatacaaaaattagcagggcgtggtggcgcatgtctgtaatcccagctactcgggaggctgaggcagaagaatcgcttgaacccggaaggtggaggttgcagtgagccaggatcatggccattgcactccagactgggcaacaagagtgagactccgtctcaaaagaaaaaaaaaaaaaaaacagaagaaaagaacagagttgcttcgaagctatgtattagttgcttcaaagctatgtttcttgtaggatgcggacagggagatagaacagtagaagaataactgattaattaacagcaggttacttcagactaccttctgttgtgtaacaaataaagataatgttgtgaacttcattatcatgccgattgtagatttaaattggcccgtttgggaaattggctgttacatctttcttctgatttcttggaaggtggaataacagattagtttgggtttggtgacatgaaactttagcatgggtgactccattttgatttttagtctggtctcttgaggcctagtacagaaacttagtccagaacaatagcctcttacaatttttatttaacaattgcccccttttggtcatgctcacctaagtgagagtgtgaccaaaatctagggcatccacattactgttaccatgattttgggtttccagcctcagcatgccatttgtagattatagtgtccatagtttacggtgttctaggaaaaaccaggtttttgttacataaccaggaaagattatgctcccagacactttgaagggtgacagggaacagaatttattgggtgaaaaggaaaaagaaaaaacatctcagcaaagtgggatggaatcctgttaacagggtctccacctcacctattgaatcccaggttaccacacacgaacaggagaggccaggctcctcccctcttcaaatggcgtgaacttccgaggctccaccccaccctcccagtgcaccggcctgttggagattctctggggaccttctcccttatctgtcgcctgcatccattagtgtcttccttattatgcatttctttgagatttggttgttccagctagagagagatcatttgagatttgacagatggctgtatcgaaaatttaaaactttaagaggataaaacgcaccacgggactaatattatgactattaagaggataacactgggctgggcgccgtggctctcgcctgtaatcccagcactttgggaagccgaggcgggcggatcacgaggtcaggagattgagaccatcctggccaacatggtgaaacctggtctctattaaaaatacaaaaattagctggccgtggtggcgagctcctgtagtcccagctactcgggagactgaggcaggagaatcgcttgaacccgggaggtggaggttgcagtgagccaagatcacgccacagcactccagcctgggcaacagggcgagactccatctcaaaaataataaaaataataataataataaatataaataaaagacgataacaccaagagtttggagtatgcttcttagccagggtccccatgacctaaaccaaccaacatcaaatacacaaactaggagtctacccatttgaatcaaggtatctgctctataaaacctgatgtatttatctacgcacaataagaaatgtcatcaactgcagattcctccctattgagttagtaagtaatctaacatctcatgattggattaaatgaaatcagggagtgcaggttacccacagaagctactgattgtaaaattttaactacaccattatcctgccaagtgaaagagctaggcataagtaagaaaaaatgaagataggtaagaactttattatggtagacagctttgttccaatggtcttgggaaaagctgtccacagcatgaagttggcaacttcaaatcatggtttgcagtttgaatgtctctggttgtagcatcagcattctcgtgaattatctgtgacccatgcatcaggcatgagaggtgttacttgaaatttatatcgaattgtccagctttagcctataaggtttcaggtactgagcagttctcattctttgttgcagaattctggccaagtattatagaaaactggaagaaatcagaatccagtccagtctacaggtaaataatcacaactcaaaataatgaacagggctacaatctaataataggtgtaatacagttttcttttgaaatgtaatttttctttctacagttttctccatttctaccaaaaataaccaccatggtaagaccaatttgtttgcaaaaaaaaaaaaagttttttcttttaagctctttatagtttatagcaatttggtgaaatatacttttgtaaacaaaaattgagacttttgattttcctccatgtgtaatccctccagaatttggaaactatttgtgagtattcttattcttatggccttatggctatttgcataagttcaataagacttagttctctttataacaggatacaactgaaaacacaaattgtatttccaaggctttgactggaatgtcatatttacaaatgtgcatagacttcttggcttcaaggtttcccaaccttataatgaatgagtaaaagttttcacttctgggtagacccaggaacctcaagatattagatacagcaggtaaaattcaatgactgccttggtttggcttcctagcattgagaggtttttaaaaatctaatctgagattccttgtaaaaatttccagcaaaacaactttaaaagaagcctatgtagttattcttgcttcattatgttaataatcaggccaagtttgagaataaacttactttgcaaacaaatttttgtgaataactaggaagtaagttatttgagctatttgtaatataccaacattttatgactatatatttcacaatttttagacattgtgaaaaaaattgttcttgaaaaaacaagttttttgctcctcaaagaagtttttttaatttactaacagagattcaaatatatttagtttgtctacatcatatagaaacaaaatgccaaagtatacaaacttaaagcttatacttaataattaatgttttagtattttaacttatttagcaattaccaagacatttaactggtatatattatgtaattctgctttaagatttcaaattaccaaaaacattttttgaaactatgaggagtttatttgtgaacacttatgcctaatttacttgtttttgacaatcatgtttgaactgtttataaaacttctgtaaggcattgaacaaaactctccatcatctcaagttatttctctgctaacaatttctacagcatgcaaatgataggcaagaactctaaagttaaatacatgagtatttttgctgatcagaagacatggctgcttttcaaatacgttgactcttgaacggcatgggtttgaactgcacagttccacttatatgtggattttttttttgcctctgccaccctgccacaggaagactaacccctcctttttctcctcctcagcctagtcaatgtgaagacaatgaggatgaagacctttatgatgatccatttccatttaatgaatggtaaatatatattttctcttccttataattttcttaataacattttattttgtctagcttacttcattgtaagaatactgtatataatacatttaagatacaaaatatatgttaattgactgtttatgttatttacaaggcttccagtcaatagtaggctgtcaatttaaataacagagagtggctctctaaaaatacatatatatatttatttgggaataaaacattacagtggaaatacacatgccgcagtaaactatgtgcatattcagggaagtcaaggatgacaaaggcttttaaaggaaaaaatgaggaggatgacataattattttgaaataattatccttgattacaaagatcaataataagggtgatgccagtctgaagtccgacaggtagttgctaggcagatgtccttttagaagtatttttttgcataaggttgcagtggcctttgtttaaggttgtggcttttgcagtcttttgtgatgatttttgttatcaggcacacaaatatgagaaccctctcttcatgaccttccctggctctatttgtccggattttcttaacccattttgattttgacaactttcacaaggctattagtagttaagtttttgggaaactgtcgcagatgagtgacaactatctgggccagtggcacagggttaaaataatttactatgacagatgtaggtaaagaaaggcagatttattagagaaagtatgaaaatatgttgcaaagaagcaatgaacagaatcagcacgagaggagctgactgaaaggaaacaaaagcttgctggagattttaaagaatggttcttgggctgcagagtgctgcgagcagtactcataaccccaaagttgcagtgagctaacttgcaagtgtctggtgatagctgggctcaggaagattatgagttatttgcacaggagggctatgtgtcctggaccatgaatgtcatcaacatattaatgacattctttacagaaatagaaaaaacaatccttgtttctattgaactgcaaaagacttttaataaccaaagcaatctagagcaaaaacagcaaatctaaaggtatcacactaccttactttaaaatatactataaagatctagtgaccaaaataggttgatattggcataaaatcagacacatagaccaatggaacagaatagaaagaccagaaacaaatctgcacatctatagccaactgactttaaaaaaaatttccaaggacacacattgggaataggacagtctcttcgataaatggtactagggaactggatagccacatgaacaaaaatgaaactagatccttatctttcaccatattcaaaaatcaactaaaaatgattgaaagacttgaatgtaagacttgaaactaaggaattagtaggagaaaacattggagaaatacttcatgacattagactgaggcaaagattttttgttactttttttatttttcaaaagtactattttcacaagaggatgggtgtcaaggaaagattttttggctatgactctacaagcataggcaacaaaagcaaaaatagacaaatgggattaaatcaaactaaaaactctacagcaaaggaaacattcagagtgaacagacagctacagaatgggagaaatatttgcaaactatatatatgacaagtggttaatatccagaatatataagaaactgaaacaactcaagagaaaaaataaaaagaccaccaaataacctgatttaaaaattggcaaatgatctgaagagacactcctcaaaataagacaaatagccaaaagttatatgaagaaatgctcaacagcactaataatcagggaaaagcaagtcaaaaccaaaatgagatatttccttattccagttagaatggctactgtcaaagagacaaaagattaaaatgctggcaagaatgtggagaaaaaagaacatttactcattgttgatggagatttaaattagtacagccattatggaaaatagtatggaggtttctcaaaaaattaaaaataaaactaccatattactcagcaaccctattactgggtatatatccaaaggaaaggaaatcagtatgtcaaggagatgtcggcactcctaggtttattgcagcagtattctcagtagccaagatatagaatcaaccaaagtgcccatcaacagatgactgaatagagaaaatttagtatatatacataacgaaacactattcagccataaaaatgaatgaaatcccatcatttgtggcaacatgggtgaacttggaggacattatgttaagtgaaataagccagaccctaaagacaaataccatatgatctcattcatatgaggtagctaaaaagttgatctcttagaagtagaaaatagaatagtggttaccagatattcatccagaaaaatgaaaacttacattcacagaaaaaaactatgcataaatattcatatcagctttatttataataatgtaaaactggaaataatcaaaatattctacaataggttaacagttaaataaactgtggtacatccacaccatgaaacactactcaggaatgaaatgaacaaactattggtagatacaaccccaaaaggctatatactgtataattccatttatataaccttcttaaaatgacaaaactaggccaggcatggtggctcatgcctgtaaccccagcactttgggaggccaaagcgggcagatcatctgaggtcaggagtttgagacctgcctgggcaacatcgtgaaaccccatctctactaaaaatataaaaattagtcgggcatggtggcacacacttgtaatcccagctacttgggaggctgaggcaggagaatcacttgaacccgggagatggaggttggagtcagctgagatcgcactccagcctcggtgacagagtgtgactctatctcaaaaaaaaaaaaagataagagtatagagatggagaacaaattagtagtttacagagtttagggatggagggtgcagggggttgagtgtgactataagggagtagtagcacaagggagatctttgcagtgactgaagagttttgcatattaattgctaatctacacctgtgatcaaatgacatagaactatacaaaaacattgtgccaatgtcagtttactggttttgatattgtactatagttatgcaaaatgtaacatttaggggaaactgagtaaaaggcacacaggatttctttactatctctgcaatttcctgttaatttatatttcaaaataaaaagttaataaataatcaaagaaagacaaagtcagaggcttatgtgtttggtgagacagtgttccctgatgcaaggagcaatggatttggagtcagatgaaccaagacccagtttctgctccccatgccttaccagctgtgtgcccttaagaaagtcagttaacctttttgagcttcagttttctatttcatagaatggtccttatcgattttctagctacaaacattagctatttgtataccaccttataaacaatttttgccatattctctatagcctgttatattgtgtacttaatatttcttagaggccaggcacgatgactcacgcctgtaatcacagcagtttcggaggtcaagacgggaggatcatatgaggtcaggagttcgagaccagcctagccaacatggtaaaaccccgtctctactaaaaatagaaaaattagccaggtgtggtggcacatgactctaatcccagctacgtgggaggctgaggcaggagaattgcttgaacctgggaggcggagcttgcagtgagtcgagattgcccactgcactccagcctgggcgacagagcaagactctgtctcataaagatatatatatattccttatagagatcaacacagtccatttacttaaatccataccaagcccaaatcctgagtgatgttatatataaaaccacgacatcaaggactagtgaattttttctcaaatgagcattaacgtaaataactattaaaaacatatgcttttttgtgctgcctaaatgatcacacatactatcaatggtatggaccacatatttcaggaaacattagtttagcccaaatactttactttttagatagagaacatgatgtctcatagacagaaataaactttcagatttgaaagatcacttaaaatataaactacaatttctcatcacattttaaataaattccaaagtccttaacgagggcctattggatctgataggatgtagctgtgcctgcctctatgatttccgtttcttctatctgttctcttgctcccactactccaaccacacttgacctcttgctcttcccagcataccaaacacttttttgcctcaggggctttgctcttgctgttctctctgcctggaagattctagatatctatgtggttcaattcctagtacattcaggttctgccctatgccacttcctcaatgagtccttacttgaccctcctgctcaaaatagccacacacacatatatcatgttattctctattccccttactgtgcactcaatcctgtgtgcctaacacacacacacactcacactcacacatacacatgtatattattctgttccccttactctgcactcaaacctgtgtgtcacacacacactcacacatacacgtatatcatattattctctattccccttatactgcactcaatcctatgtgccttacacacacacacccacacatacacgtatatcatattattctctattccccttatactgcactcaatcctatgtgccttacacacacacacacacccacagatgtatatcaatattctctattcctcttactctacactcaatcctgtgtgcctttcacacgcacacccgcacacacatattatcatacacacacacacaagtatattattctctattctcctttccctatttttctttatagcacttatcaccaactgacactatatgttgtccctctccctaattagaatggccggactttgctttcttctcttaagctcagtgcctagaattgtgccagtgcacagacccacatgcagccaattcagccatcctccctgcagaatctgaggggagtggtcatgtcgtctcagtttgcagctttaaaacagcaggagccaccagctagctcctccaggcagtctaaccattttccagatggttcccatcttcagaggtctttctgatgagtttcaaaacttgtgcccttgcagtttccactcaggcctattagttctgccctgtgggcctacagagaacatgcctttcagatacttgaagacagcaattatgactctctccagctgtttactgcttttcaagttaaacagacctctccttccatcattgctcaggcataatcctctgggatgacagaaagaacatgttatctggggacaggtaacccagatctgaatccagacctcactcatagtcactgtgtaaccctgagcacatcacacctgcctaacagggctcctgtgaggattccagggggtcatatatataaagtgcttagcatagttgctgcctgacagtgaaagttcagtggatgacattgatgttcattgctttcctgaagaaagttctgtccaaatcctaaaagcaaaacaaatttcctgaaccccatcaggtccgctgcctgcatgtagaaagaggagagtaaaaccgatgcacactggactcacccaaaggcggaaaaggacaaggaacccaaaaaggaagatccagtgggcccacaggcagccctcctaatggagcctgggcagtgccctcttctttttgttggaaaaacagcatgaaatattttttgctttgttgtttgaggctggagtccaagaaagacccagaaatggttgatatgaaggatttggagcaggaaaataggatacaaattcagagttaagagctggacaacgagttgggttatgagggcttccaccccagtccgtttctttcttgctcatggtaggaccctagacaattcttttccactctcagcctgcattttcttagctgggaaatgccaattctaagagctactgggatacaattatatgccacatgtgcgttcactcactcagtgcttttcaacacatgttcactgtatgctctgggtgtaccaaaatgacagcctgttcctaacctcaggggtctcactgtctattaaaagtttcccttagggtatcattctgaatgggaggaggaactagaaaaacacttagttccagtgtgtcatgataaacacacagagaaaaagaaaacagcagctgtgagaatgtaggggagggggataaattctgaaggagagggacaggaaaggcttcttggagaagggatctgttctctggccagtgcaacagccttggagaggacttgtacctcctctgctcgtgcctttcaccatccccaaggatatctagagcaggaccctgaacaccggataatcagtttatactgctgagtggcaggctgatgttctgggtggtgtaacattctgcccttctctaattttttgtctgtgagtcagccttgcctaggtcaataaaatgctgagtgcacacccagcttccccagcacactcagaatgctgccagatcatttctcacccctctcaggagacattaaactctctgtcctggccttagttgtccttgtggtcctggctcagactgccccaggtaaacagaaccatggagagaagggaaaagggagtaaggatggggtcctaaccacagaatcactggaaaattgaacatgtgtagaagcaaggagagcccacagggatggctgagatctgatgaaaggcttataatgaatatgctcccataagaagggcagcctgtcaggcctgaccatggtggtggttctcattagggaacctggagaatatctgcagaggccaaggtgttttatatgaagtcccttccatatgcagaagcaaccccaacatctctagtatcctgaatgcctctggcccatatgtcaacagtctcatcctgtgagtctctcacttcaaccccactttcagttgatactacctcttctaataatcagtctcattacttcacttctccactgttgttgggctttgagtgctcctttaaagcaggcagaagaggcaacttgctcttgtcttggaatatatggtgaaaaagttgtaagttgatgtttgatatctacaggtttataaaaacaggctcacagtatggagctggggttacagcagaagattttggctttcaagttgaacacgctcaaagctctctaacagtataaacaggcatcatggccaggtggtgaataactttctaatggaaatgttttccccttaggcttcccaggggctctaaagttgatgatttttaattctgtgatttcctttgggtcgttgctgttggaagtcacatcctctcttggagcagctattcaagctgaaagcctttgccaatcactcagttgttctagaagcaaaagaaggttattctgggctaaccctgagttggcttgagcatgccttatgttccagcgagggcaagtagaatagagggagttgcagatgcaagagacattttggagaaagaatctacatattgacttatgaaatactggaagagaaaagtgagagtcaatgtgactgatttttttcagcctgaacattctggtaaaagacagagaattaggaattatctcccagaagaagagtttggggaaaagacaagtggaaagaatctgtagtttagattaagatataatgatccctcaaatgaatccaatgtgctgagaaaactgggtttgcagtctgcgttgacttagagtcacagaaaataaatcagagaagggcacagtgttaaaccctccctgcacccaccccccaacacacacacacacaaacacaacttcagcctgcagctcagaaatgtaaattggtcatccattgttcagggtcttgctttaaacaacccctggggcaagcacccctagaacaaacaatgcctggcacatagtagatgctcaacaaattgtggttagatgaataatgaatggagagaggataaaaaagataattgaaggcttagtcccactccctggcaagcatctagatttagagaggaagtagaaccagatttagtgagactgtgaaaaatgacagagaagaaagtatcataagcataggaataaaattcaattagagctgattagaggaagataactactcctagtcattaaacatgcacaaatttataacattcccatgaatgcctttaagtgtcaaaatcaatgtttcactctaaccattattactattaccaacatcctttctttaattgtatttatttttcaaatgtatttatatattcatgtgtttgcttattttgatagatggatggatcagaaggtgctattatggaactggcagatgcaggaaatcatgcaaagaaattgagaggaagaaagaaaaatgtggggaaaaacatatttgctgtgtccctaaagaaaaggataaactatcacacattcacgaccaaaaagagacaagtgagctatatatctagttgcgactcctaattcagaattttaagtcattataatgagtcaatgaaatggctatcgggggcacctgcattttcctagatctctgtcaagtcttcacagggcccgttagaaaaacaagctcattcctgctatcaatatatctctctagcctgctgtagcccaacaatgctctaagctgtccctggatatgactaataatagtggttttcaaggtaagaaaattttataggatctagatcttgaattcctaaacctctgtccgggtccctgaatgtagaagtttaccaggttaacgcaaattggaccttagctacagattcttacctaatgtctcatcctggagagttgcaataaaacagagtaatccagaaagtgtccttctctgtctttagctcaaaatttagctcaaggctctgccatatggtcttactcttggaacttatcccttaccccaaattcctaggcacctttggctgtccaaagattggcatgccctctgagcaggaggaaactattcctgctcccaagcaaatggaagaggaaaataaaaggcccaagatttagtgagaacttattatgtgcaaggtcttgtcctaagcattttacttcattttgtcccaacaacagctccaggagataggaactagtgtgccccttcgccagaagaggaaactaagtcacagagagtttaagtgacttgccctaaatggcacagatagctagttcagtaacaggactttgaacctgcaatgcctggcttcaggtaccgtgcttccccatagtggaaagagattgctgcattacgaaaagcttcactttacccttcccacacagaaccaacctctttaatagggaaggtgtggtgaagaaagagctttgtgtgccctcttgtggttaaaatgtgtaatgaacccagtcccagcaggttcatccaggttcaaataaaggttatcctaggttgcactcggctagcgagaaatggctccggctttacagagagttgcagctcaggggccaatgccaatcacatctgaagttgaacagtatccataccttctgttgacacaacgatctggaggacacagtccaaaggcaaggtacagcaatcatcacagtaatggcagccactaacccttcagcccagttcccaaagtacttcctgtcagttctctcatttccccccactagaatactatgaggcatcttcaaaatggaagcattggtctggactataaactccatatacctttcaacctttaaggccttcttcattctttacattatggtgaaaatcatgcactctctacctatgactgcagaagatgccaccttagagagcaaagacatggaagatgaagagagagactgggaaataggaaatgtatacctcaatctgggtactcaaaccataaccctaaaatacaccttctgttcctccttgcttccccatacgcatatatcatgttagccacgcagactttccaagtctgcttctatagcacctgcccttcatctctgcctctagtcttccagttcagccatcatctttccttgtccattgctgtggaatgaattttgtgccccacccccccaaaaattgtgtgttgaagtcagaacctccagtgcttcaaaatgtgactgcatttggagacagagtcttgaaagaggtgactgagtttaaatgaagtcattaggacagatacaaattcgatcggactactgttcttataagaagaaattaggacagaattattttacaaataattatgacccacagcaagaagaccacgttaagatccaaggagatcatgaccatctacaagtcaaagagagaagactcagaagaaatcaaccctactgacaccttgatctcagatttttagcctcctgaattgtgagaaaataaatttgtattgtttaagccacctgatctgcgacactttgttgtgacagccctggcagactgatacagacataccataacatcagcatcctagtcatctctttttctctcattaggacttcgactcactccaggcttttcatacagttgccagaagaacatctctacaatccaaatatgaaacttttttctttccaaattgtccaaaagctacataaccctttcaggaatcaattctcaactccctttatgataatccctgcctgcctcagtagttttatatccagttcctcctccctttcaattcccaccgtggacctcccaaaacaaccttattcttggaaattaattaatctaatttcttgcccttctttttatagactgccccttctgcctgaaagtttcttattgcaaaccagattactccatccccttctgaaaagaggttaagtggggaagaaaagtcatcctaagaatatttattaatttaaaaactcattggtgaaataagtctccactcaaacatcccaatttcttagaatctgtgcctctcccaaacccagcaggtcaatgtcttccatggactaattgtgaacatgcaaaaatgcatggcaaattgtcgtcaagtgacatttaaaccttcttgaatatgcgggattttctctagatattgatagtcatgttataaaattaaactgttaatatgcaaagtcattaataaatgaggatcagtaagaattacattagttgaaaattaaaaagaaaattgacaagaatgatgatataagaagtaattttttaaaacacttcttaactaacaaagcgtaaggaaaagcccagagaaaaactgattggaacctagaatatttttgcaaataactgtgattttgctacattttaaaaaggcaaacctacagtaaagtattttttttattttcatgcttctaactagaattattttcattttggccaaaaaactccacttataaagaatattataagtgataactgtttggtacatctaaatgaatattgactataaaaaacaattataataataaataatatcttagggcattataatatttatataattaatatgcataacaataatagcataaaaggttgaacagaggttaatggacaactaatattttgttgatttccagacacattgtataaaatattgtagagcttccaatgatattatcttcatccagagagggtccaccctttcccttggtaggctgatatagtagaatttagttgctacaattcaatcataaagcaaactgattcaaagttagcttctagttttgataaggcattgtctacctcttgatcttttgtcggtgtagccatgccttctacatatagaaccagcttatactcatttcagaagcattaactctctagcattgaatatctcataaaactcatacttatccagtaagtttttagatgcaatatgtggttgtacttaagagcctattctttggagccagaaacttttttttattattacactttaagttacagggtacatgtacacaacgtgcagttttgttacatatgtatacatgtgccatgttgctgtgctgcacccattaactggtcatttacattaggtatttctcctaatgctatccctcccccctccccccaccccatgacaggccccggtgtgtgatattccctaccctgtgtccaagtgttcttattgttcaattcccacctatgagtgagaacatgcaatgtttggttttctgtccttgcaatagtttgctgagaatgatggtttccaccttcatctatgtccctataaaggacatgaactcatccttttttatggctgcatagtattccacggtgtatatgtaccacattttcttaatacagtctatcattgatggacatttgggttggttccaagtctctgctgttgtgaatagtgccgcaataaacataggtgtgcatgtgtctttatagtagcatgatttataatcctttgggtatatacccagtaatgggatggctgggtcaaatggtatttctagttctagatccctgaagaatcgccacactaccttctacaatggttgaactagtttacagtccccccaacagtgtaaaagtgttcctgtttctccacatcctctccagcacctgttgtttcctgactttttaatgattaccattctaactggtgtgagatggtatctcattgtggttttgatttgtatttctctgatggccagtgatgatgagccttttttcatgtgttttttggctgcataaatgtcttcttttgagaagtgtctgttcatatccttcgcccactttttgatggggttgtttgattttttcttgtacatttgtttaagttctttgtagattctagatattagccctttgtcagatgggtagattgcaaaaattttctcccattctgtaggttgcctgttcactctgatggtagtttcttttgctgtgcagaagctcttagtttaattagatcccatttgtctattttggcttctgttgccattgttttcggtgttttagccatgaagtccttgcccatgactatgtcctgaatggtattgcctaggttttcttctatggtttttatggttttagatctaacatttaagtctttaatccatcttgaattaatttttgtataaggtgtaaggaagggatccagtttcagctttctacatatggctagccagttttcccggcaccatttattaaatagggaatcctttccccatttcctgtttttgtcaggtttgtcaaagatcagatggttgcagatgtgtggtattatttctgagggctctgttctgttccattggtctatgtctctgttttggtaccagtaccatgctgttttggttactgtagccttgtagtatagtttgaagtcaagtagcatgatgcctccagttttgttcttttggcttaggattgtcttggcaatgtgggctcttttttggttccatatgaactttaaagtacttttttccaattctgtgaagacagtcattggtagcttgatggggatggcactggatctataaattaccttgggcagtatggccattttcacgatattgattcttcctgtccatgagcatggaatgttcttccatttgtttgtgtcctcttttattttttgagcagtggtttgtagttctgcttgaagaggtccttcacatcccttgtaagttggattcctaggtattttattctctttgaagcaattgtgattgggagttcacttatgatttggctctctgtctgttattggtgtataagaatgcttgtgatttttgcacattgattttgtatcctgagactttgctgaagttgcttatcagcttaaggggattttgggctgagatgatggtgttttccaaatatacaatcatgtcatctgcaaacagggacaatttgacttcctcttttcctaattgaatatcctttatttctttctcctgcctgattgacctggccagaacttccaacactatgttgaataggagtggtgagagagggcatccctgtcttgtgccagttttcaaagggaatgcttccagtttttgcccattcagtatgatattggctgtgggtttgtcataaatggctcttattatacatcccatcaatacctagtttattgacagtttttagcatgaagggctgttgaattttgtcaaaggccttttctgcatctattcagataatcatgtgtttttttgtctttgactctgtttatgtgatggattacgtttattgatttgcatatgttgaaccagccttgcatcctagggatgaagccaacttgatcgtggtggataagctttttgatgtgctgctggatttggtttgccagtattttattgaggattttggcatcaatgttcatcaaggatattggtctaaaattctctttttttcttgttgtgtttctgccaggctttggtattaggatgatgctggcctcataaaatgagttagggatgattccttctttttctttttattggaatagtttcagaaggaatggtaccagctcctctttgtacctctggtagaattcagctgtgaatccatctggtcctggactttttttggttggtaggctattaattattcctgaatttcagagcctgttattggtctactcagggattcaacttcttcctggtttagtcttgggatggtgtatgtgtccagggatttatccatttcttctagattttacagtttatttgcatagaggggtttatagtattctctgatggtagtttgtatttctgtgggatcggtggtgatatcctctttatcattttttattgtgtctatttgattcttctctcttttcttctttattagtcttgctagcggtctatcaattttgttgatcttttcaaaaaaccagctccaggattcattgatttttttgaagagtttttgtgcctctatctccttcagttctgctctgatcttagttatttcttgccttcggctagcctttgaatatgttggctcttgcttctctagttcttttaattgtgatattagggtgtcgattttagatctttcctgcttccccttgtgggcatctagtgctacaaatttccctctacacactgctttaaatgtgtcccagagattctggtatattatgtttttgtttgcattggtttcaaagaacatctttatttctgccttcatttcattatttacccagtagtcattcaggagcaagttgctcagtttctatgtagttgtgcagttttgagtgagtttcttaatcctgagttctaatttgattgcactgtggtctgagagacagtttgttatgatttctgtttttttacatttgctgaggagtgccttacttccaactatgtggtcaattttggaacaagtgcgatgtggtgctgagaagaatgtatattctgttgacttggggtggagagttctgtagatgtctattaggtctgcttggtacagagctgggttcaagtcctggatatccttgttaactttctgttttgttgatctgtctaatgttgacagtggggtgttaaagtctcccattattattgtgtgggagtctaagtctctttgtaggtctctaagaacttgctttatgaatctgggtgctcctgtattgggtgcatatatatttaggatagttagcccttcttgttgaattgatccctttaccattatgtaatggccttctttgtctcttttgatatttgttggtttaaagtctgttttatcagaaactaggattgcaaaccctgcttttttttgttttccgtttgcttggtagatcttcctccatccctttgagtctatctgtgtctctgcacgtgagatgggtctcctgaatacagcacgctgatgggtcttgactctttatccaacttgccagtctgtgtcttttaattggagcatttagcccatttacatttaaggttaatattgttatgtgtgaatttgatcctgttgttatgatgttagctggttattttgctcattagttgatgcagtttcttcctagtatcgatggtttttacaatttggcatgtttttgcagtggctggtactggttgttcctttccatgtttattgcttccttcaggagctcctgtgaggcaggcctggtggtgacaaaatcactcagcatttgcttgtctgtaaaggattttatttctccttcacttatgctttagtttggctggatatgaaattctggttgaaaattctttctttaagaatgttgaatattggccccactctcttctggcttgtagagtttctgctgagagatcagctgttagtctgatgggcttccctttgtgggtaacccgacctttctctctggctgcccttaacattttttcctgcatttcagccttggtgaatctgacaattatgtgtcttggggttgctcttctcgaagagtgtctttccggtgttctctgcatttcctgaatttgaatgttggcctgccttgctaggttggggcagttctcctggataatatccagcagagtgttttccaacttggttccattctccctgtaactttcaggtacaccagtgaaatgtagatttggtcttttcacatagtctcatatttcttggaggctttgttcgtttctttttactcttttttctctaaacttctcttctcgcttcatttcattcatttgatcttcaatcactgataccctttcttccacttgatcgaattggctactgaagcttgtgcatgcgtcacgtagttctcgtgccatggttttcagctccatcagatcatttaaggtcttctctatactgtttattctagttagccattcatctaatcttttttcaaggtttttagcttccttaagatgggttcgaacatcctcctttagctcggagaagtttgttattaccaatcttctgaagcctacttctatcagctcatcagtcattctccatccagctttgttccattgctggtgaggagctgcaatcctttggaagagaagaggcgctctggtttttagaattttcagtttttctgctctggtttctccccatcattgtggttttatctacctttggtctttgatgatggtgacgtacagatggggttttggtatgcatgtccttttgttgatgttgatactattcctttccgtttgttagttttccttcttaacagtcaggaccctcagctgcaggtctgttagagtttgctggaggtccactccagaccctgtttgcctaggtgtcaccagtggtggctgcaaaacagcaaatattgcagaacagcaaacgttgctgcctgatccttcctctggaagcttcgtctcagaggggcacccggctgtatgaggtgtcagtcggcccctactggtaggtgtctcccagttaggctactcgggggtcagggacacacttgagggggcagtctgtctgttctcagatctcaaactcgatgctgggagaaccactgctctcttcaaaactgagttggaaatgcagaaatcacctgtcttctgtgtcgctcacactgggacctgtagactggatctgttcctatttgatcatcatggaatgatcccctggagccagaaaagtttattccacttccctgttctgccactcttttggggaggacatcaaaactttctgagcatcagattccttttccataaagtggatattatttaatactacctttctcagtatattgtaaggtcaaaataagataaagtacacaaccatttactatgttaccatgttctttacatgtaacatatgtaaataagttattgtgtttataagaataagaataggagatacaatgaaatgtggggacttaaggggaagagtgagaagggggcgagggataaaacactacaaataaagtacagggtatactgctcgggtggctggtgcaccaaaatctcacaaaacaccactaaagaacttactcatggaaccaaataccacctgtactccaataacctatggaaaaaaaaaagaataagaataggagataccagccttcataccctaccaaaaaagatctctctctctttctctctttctctatctatccagctagctatcctcaaaatcaaaacagccctgagacagctcaagggcccattaaacatttaaaaatctgtagcaacacagtggaccaaaaacaaacaaacaaaatggagaacatccacaaagaaaggattgctagtgaggtcagcatatctgagactataggagacagttagaaacaaagaagaaaggcagagtgtcagttatgcagtgtaaaccactatggtcccagtggcctactctgaagaagacaacagcatcatttgccacaaaggttaacaatagtcattcccactggggaacctttgagagatgcagctgcacaaccctccttcctccaagaagcactactgctgaactgctttgggaaagaagccaccatcactgtcaatccccatgtgcactaatccccatgagaatttgggctctggggctgcacctcacacacacacatctcagaccctgaaatcatcactatagcaagctagtttgtactccaggccccgaagctatgttctctccagacaccagttcaactgccatagacagctagctccactgcaagcccagagcccctgtaaccctgcctatgctctccttcttgatcccctgactgcttcacaagtatcacactttagattgttactaatgaggcagttggggtgcctgtgcccttggtgccagtgtcattaccactccagatcccagagccatagtctctccaaacatacctgtgctgcaggcctcagcaacatggccactccatgggtgccactcatcaaacaccagtgccaccagcactacaagcaagccacaagacaggttcagtgtcaagagggattcatgcagccacaatttccctagcgggagaaaaagagatacagaagaccttagcagccaacaccatcaaagacctcagcaatcctcactgccactgctggcatccacagtattggtcactaaggattcctgcaattttaatcaacaccagcatcagttgacagagctgcacagacattataccactgtaccttcagtgatgccagaacagttacccttcactcagaaagcacccttgcactcccctccctccatagaggcaggtctttccacaccagaattaacctgtaaagtctgaaaaaggtgattgctccatcaaatatgatgatattaacataagaaacatttaaaaaccaaggacacataataacaaagaatatgataatttcctagtacctggtcccctaaagaaatggaaatatacaaactgtgtgacaaagaaatcaaaataattgttttaaagaagctaagcaggctgggtgcggtagctcatgcctgtaatcccagcactttgggaggccgaggtgggtggatcacctgaggtcaggagttcaagaccagcctggccaacatggtgaagccctgtctctactaaaaatacaaaactcagctgggtgtggtggcagacacctgtagtcccagctacttggcaggctgaggcaggagaatttcttgaacctggaaggtggagtttgcagtgagctgagatcgtaccactgtactccagcttgggtgataaagtgagactgtctcaaaaaaaaaataaaaataataagtaaataaataaagcagctcagcagactccaagaaaatacagagaagcaattcagtaaaatcaggaaaacaataaatgacaaaatgagaaatttaatagaaattgaaattgttttaaattatagagctgaaatacacaatgaataaataaaaaatacaataaaaagcatcaacagcaaaattgatcaaacagaagaaagaatctgtaaaattgaaaacatacagtcaaatgagaaaaataaacaaaaagaatgaaaaaacattacaggatttatgagacagcaccaaaagaacaaatattcaaattataagtttctgaagaagaagagagagccaaaggagtagaaagcttatttaaagaaataagagtaaaaaacttcccaaatctggaaaaagatataaatatacagatacaagaaggttaaaggttttgaatcagattaaactcaaaaagactacatgaagacatacactcaacagtcaaaaatcaaagacaaagggagcatcttgaaagcagcgagagaaaatatgcaaataacttgtaatggagttccaataaggctagcaacagatttctcagtaaaaaccttacagaccaggagaatgcaatgatatatccaaagtgttgaagaaaaaaaactgccaaccaagaatactttatgcaggaaatctgcactccacaaatgaaggaaagataaagctttcctagacacagaaaagctgagggagtttatcagcacaaggcttgccttacaagaaagactaaagggaattatttctaatgaaataaaaggatgctacttagtaagactataatgtttgaaagtacaaaacccactggtaaatatagatcatgatggctgactagaagcatccagaacttaccacttttacagagaaggactaaacagtattaggttggtgcaaaagtaaatgtggtttggggcgttaaaggtaatgatagaaaacttcaattacctatgaaccaacataatagataaccacatatcaaataaagtgtctagaagagaatgctggaatccagcagagaagcaacagggactctgaggcacaaaagctcaagatggcagcatagagaaggaatcaaggcagccagctgaatcagctcagagccaggaggaactccgcattgttgggaaaaaggtaactgaaagatacgtatcagtccacactcccaccagaaatgcctgaagttctaactgcagaaaagctcctagaccctcacatgtcctgagcctagtctggaaagctgcctggaatccacgtgactgcatttgttccagggagagaatttgcacaggggcccatccctggaatgcaggctgctatagtatggtgccattttgagagcaaatacaacaacagactatatcccgccatggagaccaatagctcctgcatctccacaaccctgagacctcaccaatatccacccacacccactcaaagggctgcagcatcatagtgctggctaagcccagtggcacaaccacactgccagcatctgagaccacacaacatcccacaccccagggaacagatggtccaacacaaccggtatactggctcaaggacatagagaaccaaagtgtgagctccccagagcctgagagcaaccttcctggacctgctgccaccaacagcaacctcactcctctccagcagtggggccatgaaacaccataaataccacccaagggcccagagacttacctgcccaacccactacagaaaccaccagctcccaactactccactcaggaaatgaaaccagtccactcacccaactagagatattgccagcacttgggtgcccacctgggggcccaaggaggaactgcccagccagcatttacactctgcttgagtaaccaaggaccatcccactcagggcattacactgccactgctggtgcctgtgcatccgacctggggcccaaagactagcccacatgaagcacataaccatcaccaccagtgcctgcacattcaacataggggcctatgaaccagcccatccagcacatctgaaactgccaaagcctcaccacagcttccacaaataactacaccctaagatgctaaggagttcgcagacatcactaatgttaatgacagccaaagtaatcatatggagaccacactacagtgtccacccaaaatcaaagccaaagcaccctacccaacttacattatagatacttctacagggaaatgtttttccttacaaaagttactccataaaattgaaagaaatgtcagttacaccatatgtacagatatcaatgtaaggacacaagaaacatgaaaaagcaagcaaagacaacacctccaaatgaacaaaataattcttcagtaatagacctccccataaaaagaaatctatgaaatgcctggaaagtaattcaaaataatgattgtaaggaaacacagagatacaagagaacacagataaacattacaaatcaagaaaacaattcactatctgaatgagaaattcaacaaagagatgcatatcataaaaagaagaagcaaacagaaatcctggaactgaataacacaatgaataaaagcaaaaatacaatgtagagcttctaatataaactagattaagcagaagaatctttctgaacttgaaaactgagcttttgaagtaacccagtgagatgaaaaaaaaaggaagaaaagaaaaaaagaaagaagacatataagataccaaagcaaaaaaaaaaaaattcaaattttaaaagttccagaagagaggaaaagtcaaagaaaatgtatttaatgaaatattagctgaaaacttcccaattcttgccagagatatagacatccagacacaggaaactcaacgatccctaaacacagtcaatccataaatgtcctctctgaggcagattatagtcaaattgtcaaaagttaaagacaaagaattctaaacataggaaaagtgtcaagtcacatgtaagaaaatcctcattagcataacagcagatggcaccagagtggctcatgcctgtaatcccagcactttgggaggctgaggcaggtggatcacttgaggtcaggagttcgagaccagcctggccaacatggtgaaaccccgtttctactaaaaatacaaaaattagccaggtgtggtggtgcacacctgtaatcccagctactcgggaggctgaggcaggagaattgcttgaacccgggtggtgggggttccagtgagctgagactgtgccaaacagtccgtgggcggccagagtcctggagtgcagtgaccaggctgttgtctagcataaaggcggagcccagaagaaggggcgtggggtggaagaaacctccctcactccccccgcaatgcggcatccgctggtcctgctgctgctcctctctgccctggtgacctccttcactgcagcctctatccacgatgctcatgcccaagagagctccttgggtcttacaggcctccagagcctactccaaggcttcagccgacttttcctgaaagatgacctgcttcggggcatagacagcttcttctctgcccccatggacttccggggcctccctaggaactaccaacaagaggagaacgaggagcaccagctgaggaacaacaccctctccagccacctccatattgacaaggtgaccgacaataagacaggagaggtgctgatctccgagaaggtggtggcatccatccagccggcggaggggagcttcgagggtaactggaaggtacccaggatggagtaggcggcggccctggtgtccatccggaaggctatggacaacttccatgcagagctccatccccgggtggccttctggatcatgaagctgccacggtggaggtcccaccacaatgtcctggagggcggccgctggctcagtgagaagcgacaccgcctgcaggccatccaggatgggctccacgaggggacccgcgaggacgtcctaaaagaggggacccagggctcctcccactccgggctgtcctccgaaagacccacttactgtacatcttcaggctttcctggcagctataggggttgggaccggggagcacctgtctgtagcccccatcaggccccgccccaagcagcatatggaaataaagttcttttcttacatctaaaaaaatttttaaaattaaaaaattgcccaaacagtttatgcctcactgcctgattagaaagacagaaatgtattttattacctgcgttttatataattaagtagtatctcctttagacagtggggggggaaaagtatagaagctttttagttttacataatcccatttgtctatttttgcttttgttgcttatactttgaggtcgtatcaaaaaatcatttccttaccaaggtcatgaagtttttcccctatgatttcttctgattgttttagcttcaggtctcatatttaagtttttaatccattttgagttgattttgaatatggtgtgagatgagggtctactttcattcttctgtatgtgcatgtccacttctcccaacaacagacttcctttacttattgtgtgctctttgtatctttatcaaaaataaattaaccttaaatgtgtaagtttctttctgggctcttaattctgtgctattgttctatgtgtctatttttatgccagtatcatgctattatgattattacagctttgtaatatattttgaagtctggtagtatatgcctctggctttgatctttttgctcaagtctgctttggctattcaggttttcttgaccctgaatatttaattgtttttttctatttaaattgttttttctatttctgggaaaaacatcactggaattttgatagggattgcattgaatctgtagatcactttggatagtataaaaattttaacaatattaaatcttccaattcataaacacagatatcttttcatttatttgtgtcttcttcaatttattttatcaatgttttatagtttttagtgtacaaatctttcacctccttgattaaacttattcttaagaattttattttttgtacctattgtgaatggggtagtttttttctgcaaagtttgttgttaaggtgtagaaacactacggatttgtgtatgttgattttgtatcctgccactttaataaatttgtttattacttgtaatttttgtgtgtagtctttagagttttctgtatataagatcatatcatatgcaaacagtgaccattttacttctttctttctgctttggatgcttcttatctccttttctagcctaactgctctggctaggactttcaggactatagtggatagaagtggcaagaacgggcattcttgttttgttctcgatcttagaggaaaagtattcaacttttcaccattcagtatgacgtaagctgtggtttatcatataaagcctttattgtgttgaggtacattccttctacacctagtttgttgacagtttttaatcagaaaggatgattaattttatcaaatgctttctctgcctctattaagatgatcttatggtttgtgttctgcacatttttaatgtggcatatcacatttattgatttgcacatattaagccactcttgcattcttggaaaaaaatctcatttggtcatggtaaataatacttttaatgtgctgctgaattcatatttctagtattttgttgaggatgtttgcatcaatgttcataagaaatattgacctgtagttttctttttctgcaatgttctaccatttctttaaataagaagattacccctttgatgctttcttccccttattgatattctatagcttcaatatttgttcttttgatgttgtcctataaatcccattagctttcttcattcctttcttattcttttttcatttttctcctctgcctatatattttgatataatctgtctttgactccacagattcttttttctctttgatcaattttcctgttgatgctctctgttgcatttgttcattgcatatatttctagttgattttttaagtaatttctatttgatttttaaaataatttcaatttctctgttaaatttctaattttggtcatttaatggttttctgataccacccaaatgtttctctttattttcttaaagttcactgagcttccctaaaacaataatttataaataattataaattctttgtgaggcattttgtatatctgcagttatttggggtcagctattggaagattactgtgttgttttttgttttttgttttgttttttttttggtggcgttatgtatatctccttggtttttcatgtttcctgatgttccttatgttaatgtctatatacaagacattctaagcatggtgtctggcatggtccgtgaatgggcttgcattgaattcctcaggcaagctgggttggtgtctgggtcagcgtatcaaagggcctggcacatggacccacagggttgggcctggagcctggatccagtgggatagacttgttgattgcgttcatggaggtgggcctggagcctgggtccccaaggctgagactggagtctgtatccatggggctggcctgaagcctaagtccgagggggttgatctagtactggggtgggccttgagcctgggtctgcaggagccagccactttctgtgatgggccagtcacatgggtccactgggatgggcgtggggcctgagttcagtagggttggcctgctgtggtttcaatgatggtgtcccctccaagatttatgttaaaacttaacacccaatgctataggattaaggggtgccacctttgagagattattaagtcatgagggtggagccctcatgaatgggattagcaaccttataaaggtgtttgtgactgaagagaattctctcttgccctttggtttcttctggcatgtgagggtacagtatttctcccctgcagaggacatagcactgagggatcatcttgaaagcagacagcagccctctctagaccccaaattagccaatgccttgatcttgaatttcccagcctccagaccatgataaataaatttcttttgtatataaattacccagtctgcagtattttatcttagcagcacaaactaagatagggtctgggtcctagatctacaggggtgaacttgcagcctcagtccacaggggccagcctgctactgaggtctactgggcagacccgaactagaccttgggtctgctggagtgtgggccacagaggctagttaggagtatgtgtggggccacagagacaggcctgtcactcggcaggcctgaggacagtgtccatgtttactggtctggtgcctgaggccagggtttccagtccagcaccaggatgggcccaaagcctgggagtgtgtgggccaatcttgctcagggttggtctgaaacctgggacagtcctggagtctggggctgcaggagctgacctgtcactgggtaggccttgagcctgtatccacagggaccgatctgatgagtagggctgctggggctagcctggtgctggggcaattatgaagcctggggcagtgggggccagcccagtgttatgggaagtacagagtctggtctgctggggtcatcctggtactggggtgaccaagtccactgggcattcttggagtctgggactgcaagcaccaacctggagcttcagtctatgggagctgtccagtcactgaggcaggtctgatgctcagggtcattaagttagcccagcactggggttggcctggagcttgcactgctggggtcagcctagtagtgggaaggcctggagaccaagtctgcaggggctgtgggattccatgtggtgctgggaaagaactggaggcttagtctacaggtaccggccaggagtccgggtctgtaggggcctgccctgcactgggttttattgaggtgggcctggtgttggggttcaaggcaaaggcttgtgcttactttcctctccttcccccaagcagaagatacatctcttctaggtgttctgcctgggactgggagagggatgaggtgggtaatgtaaaatgattcttcttactttcttcaatgcatattttcttatttctgggctgcccaggtgctgtagtctctcacctggtttccttggctcctttaaagctatttttgtatgtgaataattgttcaaattgatgtttccacagtgggatgagcactgcaatgttctgttttaccatcttgttgatgtcagtcccaaaaacatattcataagcaaccagtggtcaaagaagaaaccacaaagatggctgggtgcggtggctcacacctgtaatcccagcactttgggaggccgaggtgggcagatcacgaggtgaggagatcgagaccatcctggctaacacggtgaaaccccgtctctactaaaaatacaaaaaattagccgagtgcagtggcgggcacctgtagtcccagctactcgggaggctgagtcaggagaatggcgtgaacccgggaggcggagcttgcagtgagccgagatcgcgccactgcactccagcctgggggacagagcgagactccatctcaaaaaaaaaaaaagaaaaaagaaaagaaaccacaaagaacattggaaaatatcttgagacaaattaaaatgaaaacacagcacaccaaaatttatatgattcatcaaagcaatactaagaggcaaacttattgtataaagttttacattaagaaaatgaaagatctcaaatcaataacctaactttataccttaaagattaaaagtacacaaactaaacccaagtctaatggaaggaagaaaataataaatattagaataaagataagcatagaaaacaggaaaatgacagataagaccaataaaacaaagagttggtgtttcaaaactttaagactcctgctacaagatggccaaccggatgcagccaggaggaacatatcccaccgaggtaccaggacatcgggaagactggtgcactcctagcagctctgcaggcggaaggcattaaagcagacagaggaaagacgcagatgctaggctgaatggaaagggagctgagaaccctgcacggggctactgcacttctgaactcgttcctggcccccaacaaatcctgtggaaggggtgagttaaacaggcaaggagcctctcgccacaggcctctggaatcccagcaggagacccctcaaccaccacagacacttgtgctggcaaggagagctgcttagagaagtggtagaggcagaacttcagccggtgtggagcccagagggtttggtgcaggagtatctgtaatggagcatgacaagggacacccatcctcctaggctcgacttgctcccatatgagactttagccctaggggaacttttggacctaaacactgtagggcattcttgcccatgagatgggacctgtttgacctgagcaactctcagtctgctggcctctcccagggccccaacctggccatgattgaaaacacattttaaaaaatccaaaatatcaatgaacccaggagttggttttttgaaaaaattcataagataggccattatctagactaacaaagaagagagacgatccaaataaacacaattggaaacaacaaagagaatattaccattgaccccacagaaatacaactgtcagaggctactatgaccttgtttatacacacaaactagaaagtctaggttgagaatctagaagaaatggataaattcctggacacacacaccctcccaagattgaatcaggaagaaattgaatccccaaacagaccaataatgaactccgaaattgaatcagtagtaaatagccttccaaccaaaaaaaagcccatgattagacagattcacagcagaattctaccaggtatataaagaagagctggtaccattcctactgaaagtattacaaaaaaaaattgaggagaagggactcctcttcaacttatactatgaggccagcatcatcctgatactaaaagctagcagagatacaataaaaaaataaaacttcaggccaatatccttgatgaatattgatgcaaaaatcctcaacaaaatactggcaagccaaatccagcagcacatcaaaaagcttacacaccatggtcaaataagctttatccctgggatgcaagcttggttcaacatatgcaaattaataaacatgattcatcacataaacagaaccaaaaacaaaaaccacatgatcatctcaataggtggtgatgatcaaagcagaaaaggcttttgataaaatttaacatcccttcattttaaaaactgaaaaaaataggtacagaggaacatacctcaaaataagagctatctatgacaaacctacagccaacatcacactgaatgggcaaaagctggaaacatttaccttgaaaaaggaaaggacaagtatgctctctgtcactactgctattcaacatattactggaagtcctatccagaggaattgaaccagagaaaaaaataaagggcatccaaataggaagagaggaagtcaaactattcctgtttgcagataacatgattctgtatctagaaaaccccctagtctcggcccaaaagattcttaagctgatacacaacttcagcagagtttcaagatacaaaatcaacatacaaaaatcactaacattcttatatactaacaacagccaggtggaagccacatcaggaacacaattccatttacaattgccacaaaaagaataaaatacctaagaatacagctaaccatggaggtgaaagatctctacaatgagaattacaaaacactgttactcaaagaaaccagagaggacacaaacaaatggaaagcatttcatgctcatagatagaaagaatcaatatcattaaaatggccattcttgcccaaagcaatttacagattcaatgctattcctatcaagctaccaatgacattcttcacagaattagaaaaacatactattttaaaattcatgtggaacaaaaagccccaatagccaaagcaatcctaagcaaaaagaacaaaacaagaggcatcatgctactcaaattcaaattattccacagggctacagtaaccaaaacatcatggtactagtacaaaaacggatacatagaccaatgcaacagaacagagaggccagaaataaggccacacacctacaaccatctgatcttcgacaaagctgacaaaaacaagcaatggggaaaggactccctattcaataaatggtactaagataattagctagccatatgccgaagattgaaactggaccctttccttataccatatgcaaaaatcaactcaagatggattatagacttaaatgtaaaaccccaaactataaaaaccctggatgacaacctaggcaataccattctggacataagaatcagcaaagatttcatgaagaagatgccaaaagcaattgcaacaaaagcaaaaattgacaaatggatctaattaaactaaagcgcttctacacagcaaaagaaactatcaacagagtaaacagacaacttactgacatgttttggatctgtgtcgccatccaaatctcatgttcaattttaatccccaatgttggaggtggtgcctgatggcagatgataggatcatgggggtggatccttcaagatggttttgcaccatccccttgatgttctcatgagctctggttgtttaaaagtgtgtggcacctttccccacttgttctctctctcttgctcctgctcccatcatgtgagatgccttgctccccctttgccttccaccatgattgaaagcttcctgaggcctccccagaagcagaagcctcaatgcttcttgtacagcttatggaaccatgagccaatttaaattcttttcctttaaagtacccagtctcagttatttctttatagcaatgtgagaacagattaatatacctacagaataggagaaaaattttgcaaactacgcacctgacgcaagtctaatatccagcatctataaggaatgtaaacaaattttcaagaaaaaaactaccccattaaaaagtgggcaaaggacatgaacagcacttttcaaaagaagacacacatgttgccaataagcacatgaaaaaaagctcaatatcactaatcattagagaaatgtacatcaaaaccacaatgagataccatctcacaccagtcagaatggctgttactaaaaagtcaaaaaataacagatgtgcagagaaaatagaatagttatatactattggagggagtgtaaattagttcaaccattgtggaaagtggtgtggttatttctcaaagagctaaaaaaataactaccattcaacccagcaatcccactgctgggtatacacccaaagggatataaatcattctatcataaagacacaggaacgtgtatgcttattgcagaactattcacaatggccaagctatggaatcaacctaactgcccatcagtggtacactggataaagaaaatgtgaatattatgcagccataaagaagaattatatcatgtcctttgcaggaacatggtgctggaggccattattcttagcaaaccaacgcaggaacagcaaaccaaatactgcatgttctcacttacaagtgggagccaaatgatgagaacacacagacacaaagaaaggaacaacaaacactggggcctatctgagggtggagggcaggaggagggaaagaagcagaaaaaataactgggcttagtacctaggtgatgaaataatctgtatgacacacccctgtaacaggagtttacctatataacaaacctgcacaagtacccctgaacctaaaatgaacgttttaaaaacatttataaagaagttcaataaaatcaaaaaatcttatgtagactaaaaggaaaaaataagaatgctcaaataactaaaattagaaatgaataaggggatattactaccacttttatagaagtgaaaaggattataagagactactatatgaacaattgtatgccaacagatcggataacctagataaaattgataaattcctagaaacccctaacctgccaagactgaattaggaagaaatagaaaatctgaacagacctttaataagtaaagagattgaatcagatatcaaaaacctaccaaaaacaacaacaaaagtctaggatcaacttacttcactggtgagttctaccaaacatttaaagaattaacgttaatcctcctcgaactcttccaaaaacctgaagaggaggaagtgcttccaaacttattttacaaggccaacattgcacttacaccaaagacagacacagacacagacactacaagaaaataaaactataaaccactatcactgacatatattgatgcaaaaatccattttaaaaactggcaaacagaattaaagagcaatttaaaatgattatacatcatgatcaaatgggatttttttccttaaatacaagaattgttcaacatttgaaaatcaatcagtataatataccacattaaggggaaatagaattatggggaaaaaacacatgattatctaaattgcagataagccatttgaaaattcaacaaccttttatgataaaagcatccaataaactaggaatgaaaggaatttgcctcaacataataaaagtaatatataaaagttccacagataatatcatactcaatgatgaaaatctgaaagctttttctctaagatcaggaacaagataagcatcctcactttcaccacttctagtctactatgttctattccaacatagtactagaagtcctgaccatagcaatttggcaagaaaaataaatagaaggcatccaaactggaaagaagaagtagaattatctctattcacaggcaacatgatctttttcttttcttttcttttctttttttttttactttaagttccgggatacatgtgcatgtgcagaacatgcaggtttcttacataagtatgtatatgcgtgtcatggtggtttgctgcacctaccaaccagtcacctagattttaagcctggcatgcattagctatttgtcctgatgctctccttcttttctccccgctccaaaaggccccactgtgtgttgttcccctccctgtgtccatgtgttctcattgttcaggtcccacttataagtgagaacttgcagtgtttggttttctgtttctatttttgtttgtttgttttttcctcttttattaagtccgctatactaactagaaggagaagctgtggttttcacctgacaggccacagggccaatcaccacagcttcttgtagagaacatggagagtgccaagatcaccatcaggtgccgcttccttcctgtggctttccgtcttccagtcggcctggtcttttgccttgaagggccccaaaacatcagccctggctgtcatcttcatcccaattgctgagaagatgggcagacaagaacacggagggtgtcacagagaggttcccatcaggttcacagggcgcccgctgtacctcttggagatgtcagcttcaatcagcttctgcagctccttggtcttctccagcagcaggtccagcttaggctccagagcctcctgctcctcaagtgcctcctgctgcttctgcaccatcagctctttcttcaaagccagcagctgggactgcttcaggttttgctggaggaattcagtcactcggtccacataccttggtgaggccaggttcataaacaggtgttgcagttgaagactggtaagtttgccaatcagatcttccaacactgacaccatgataaccatcttctctttggtctggccctgcaggatgactggagccagctggaactggctcacagacaggacatctgccttctcactcaactccactgctctctgggctaagaagatctcaagttccatgagctcatcaaggaactgattctgggtctcagtgtattcaagaagtgtcagagcatctgggcccctggcaacaccttctggagcctggattcctgcttccaccactgtgatctgcaaagcaacagcatcgtctccctagtctatcccatcatctccaaggtcctttgagtctgattccgggaagatgccccagtcgattccagcagcctcggcagagatgccagcgtcagtccccccagacactgcctctaccccaaagtcgccccagtcaatcgcgtcttctgccacctgctcaggaagctcctcgaggtggggtcgctccacgacagagggctctgtccctgtcctccactcgtacaccgttgagtttccccgcttctgcacgaaccacagcattggcaacacctgctctgtggggctatcacacacaaaccccacagaggcctggtacacttcgatggcttcccccagggactgctgcgccgctgccccagtctcagccagctgacttggcaggtccttcaccagggccagcagttctcctcgggtattttcgcccatgatgccatactgcttgcaggagtggtagaactgctcccccatctcagcagcccctgcctggcactcctcctccttgcagctgtattcttgctgcagctgctggcacttggcaatctgcttcttcagtgaggggatctcatagttgacattccaaaccaggaggctagagagttccactaagtaggtgttgtccttctcatacagggctataatctcctgccattccttcatccactgtgaagagtatcagccaaaaatatttttcgtggaggcctctgtgcctttgaaaaggtccaggattcttaggcagtgaaagtagtgaatgtaggatccagacagcagctgggcgatctcttcgctctctggcatgtcctggatggcagcactgatcttctctcagatcgtcagcaccagactctgccatttcaggctgcagtaccttctgtccacaagccaatcgagcagcttgctggtctggatgtcgatgggcatgtgctgatggtcctccatctttcctccacttccacttcaggccagagatctagttttctatttctgtgttagtttgctgaggatgatggcttccagcttcatccatgtccctgcaaaggatgtgatctcattcctttttatggctgcatagtattccatggtgtacatgtaccacattttctttagtctgtcattgatgggcatttggattggttccatgtcttggcaacatgatcttatttgtaaatattccacactaaaataaatgctagaactaataaacaaattcaaccaagttgcagatataaaatcaacatacatgactcataacacatattctatcctgtcggtcacattgcttacctttctaatacaatttcttggagaggctggtatcttcttgaataatggacacaagaagtttccagtgccttcaatataaaacctacactctctagcctgtatttcagcttaggctactacaatccatccatcccctcattccacaccagtttatcatttcatactctgtaccaggctaggaacacagaggtctccaatgcctaccacactgataaaaatgagtccaaagaacctgtaaactgtaccactcttgattgtgattttctttataaggaatgtccgtcctttctcctttaagcatggatgaagcaggaagatagaaaaggaaagaagtgaagtaaatgacatttgcatgctgtggtacattcaaactaccacagaaatacagagaaagtactcaactgctgctacatcagacaccttgctggtcaaccagaggaagggggatgaaaatggcactcattcatccatgcttcagcatcatagtatcactgtcttttttacctcaatctttttttacctcaaaaccctcatcatgatgtctctcctggcaccatcctacttacagtaggatgagaatatctgcagggggtttccccagggtggcatccacacttttctggataacactagatctggagaattttcctctcacccaaacataccagatggaacacttcctgtttttagtcaccagagagaggagtaggaacatatacaataagaataagggagaaataatgcattttcttcagtctctccacatgtggagtagcccaagacagccttgggaggaagccttctatagtggcacccaaaagtttcataaaagacctttgctactcttctctcttgaacagcttccatggcttcatattgtcctgaatcattgtgcattgtatctcccatgtcaaattaatgtcacctttgaaatctctccctcttcagaccagaagacagaggagacctgctttcacatcccagcatgtactttaacaatgattttgtgtctcaactctctgaaactagcttttctatctcagaaatggacttagaggagtttcagatatgggcatcagatatcaagtgtgtatagagaaggaagttttagaggcaagaacatactaaaataatttgaggaaattattttaaattctcacactaaatcttcttctctagaaattcagtaggcctggataggggcccagggaatggtatcttgcatgagtgtccccctcaccactatcataagcccccgcttgatattaattcctcaactattcccaatcatgaccttctaactctcacatttatgtatcacccagactgtcttccctcacaatatagtccatggcttaacatcataaatcaagtaacacctacaaccaccatcaataacttatgcatgtacttttttaatagttccatccagagctcttaaaaatatatctaagtacacctgatacatttatcttctgccaactgggaaccccaaattgtgttctcctcaaacttcaaagatctttccgtctcatttatatctgcttatggcatactatatttatttagtcataaatcatttatatattaatttatttaatagacatttacaaataaagtaaataaaacactcagcttaacagggatacagagacttatatgaaaatgtaagtagataaatctcatatgtgtatgcttgagatggtaaaagaaaagaatgagtgactttcttattagaagagattgttcaaaatagttcctggccctgaattattccagctggacacatgttaaaaatcattaaggaaggagaactttttataacccttgaaacataaagttctgtcttcattttattgtaaattcatttgcagtgatgattactattcctatgttttactgaatatgggaacaaggatacctcaagaaaaaaggtaaaaggaaaagggttttggaggatggagtgtaagagaaaaagtgaggagagtaaaaggaagggattatggagcagtagaagtagaagcaaggggaggaagaaggcaaaaggctagacatcataactgaactcactcccaagaaaggagaaataactttggttggttgtccatatgtctgtatgtctagttaatgttcctcctatgtttcttatttcctttttgtagagagtgtgtttgtgtgtgtgtgtgtgtgtgtgtgcatctggaaacattctagccccctgatttcatttacctgcactgccttctcctacatttagggctgtttatggtcaatgaaagtcacactcaagggagtttttgaagaatgtgaaaggacacactagatatattttattcaaggctaattagttgccattccataagacccttgctgtggtgcactcaggtgttttattaaactctagccagccctcatcccagactaacccaaattctgctcataacaacccaacattcattctttttgcaccaaacatctgacaaaaccaaatgccaatcccagttctacctccatgttatgcccactcaagccccaatcccaagacaaacacaacactagtcaagccatccaacaccaacacccagcttcaacccaacaaccagctcatccacaaatgtcctctactccaattctcagtttcacccaatttcactgctggatacattcatccacaaatacaattcttaacccagcctatcccaaaccactgccccagcctaattttataaatatgatcctcacttccatctcatcattgtttattgtttctatcattacaccaacacaaaggtcccatcctttttgtactacaattcactacccaatctccaaatagccccttgattcatcctataaatgttcaacttgaactcaatttctcacacctaacctgtatccaaatctttcatctcaatgacattgctaaccctaaattgttctatgccaatcctctctaccactctaccaaccaaaagcatcacattcttaatttgatcttagaagtacaaagccagtaagagatcctgacatgatacaaacctgagggtaaaatccctaagctgcctgacaccacatcatcaaaactgcaatacacatgcaggaccccagaacctttgagagacagaacaaaatcagaaaacttcatggcaatatctttgatgaacatagatgcaaaaatcctcaacaaaatgctggcaaactgaatccagcagcatatcaaaaagcttatctgccataaccaagtagacttcatccctggatgcaagcctggttcagtatatgcaagtaaataaatgtgattcaccacataaaaagaatgaaaaacaaaaaccacatgattgtctcaatagatacagaaaagactttcaataaaattcaacaccctttcatgttaaaaactctcaatgaactaggcactggaggcacatacttcagaataataagagccatctatgacaaccccacggccaacattatactgaatgggcaaaagatggaagcattcaccttgaaatctagaacaagactaggataccctctctcacttctattcaacatagtactggaagtgctagccagaacaatcaggtgagagaaagaaaaaaaaaggatctaaatagaaacagaagaagtcaaactatccctgtttgcagacaatattattctatacctagaaaatcccatagtcattgcccgaaagctccatgatataatacacaacttcagcaaagtttcaggatacaaaatcaatgtacaaaaataggtagcattcctatataccaacaacatccaactgagaaccaagtcaagagtgcaatctcattcacaatagccacaaaaagaacaaaatacctaggaatacagctagccagggaggtaaaagatctctacaatcagaatgacaaaacattcaaagaatgttcatctctgctcaaagaaatcagagataacacaaacaaaaggagaaacatttcatgctcatggatatgaaaaatcaatattgtcaaaatggccatgctacctaaagcaatttgcagattcagtgctattcctatcaaactaccattgacattcttcatagaattagaaaaaagtatattgaaattcatgtggaaaactattttgaaattcctgtgaaaaaagagcctgaatagcaagggcaatcctaagcaaaaagagcaaagctggatgcatcacataacccgaattcaaactgtactacaaggctacagtaacaaaaacaagacacatagaccaatggaacagaatatagagcccagaaataaagctgcacacctacaaccatctgatctttgacaaagtatacaaaaacaagcaatggggaaaagactccctattcaataaatggtgctggtatgactgactagacatatgcagaagattgaaactggacccctttcttacatcatattaaaaaaatcaaatcaagatggattaaagacttaaatgtaaaacttaaaattataaaaaccctggacgataacctaggaaatatcattctggacatagactctggcaaagatttcatgataaagacaccaaaagcaattgcaacacaaagtaataaatgggaaccaactaaactaaatagcttctgcacagcaaaaagaatctatcaacagagtaaacagacaccctacagaatggcggaaaatatttgtaaactatgcatttgacaaaggtctaacatccagaatctataaagacttaaaaaaaattaacaagcaaaaaacaaccccattaaaaactgggcaaaggcatgaacagacacttcacaaaagaaggcacatatgtgaccaacaaacgtatgaaaaaatgcccaacaccactaattgttacagaaatgtaaatcaaaaccacaacgagatatcatctcacacccgtcagaatggctattattaaaaagtcaaaaaataacagatgccggcaaggttgagcagaaaaggaaacacttatgcactgctggtgggaatgtaaattagttcaaccattgtggaaagcagtgtggttatttctcaaacagcctaaaacagaattaccatttgaccaagcaatcccattaccgagtatttgccccaaggaatataaattattctacgataaagccacatccacatgtatgttcattgaagcactattcacaatagcacaggcatggaatcaacctaaatgcccatcaatggtagactggataaagaaaatgtggtatatatacaccatggaatactatgcagccataaaaagaatgaaatcatgtcctttgcagcagcatggatggagctggaggccattatcttacgtgaaccaatgcaagaacagaaaatcaaataccctatgttctcacttataagtgggagctaaacatagagtatgtatgaacacaaagaagggaacaacagacactggggcctacttgagggcggagggtgggaggaggatgaggattgcaaaactacctatcagatactaggcttaatacctgggtaatgaaacaatctgtacaccaaactcccatgacacgaaactcacctagatgacaaatctgcacatgtacccctgaacctaaaataaaagttaaataaataactaaataataaaacaaatgtttggtagaattccatggtaaagccatcaggtcctgggattttctttgatgcaacacattttattactgattcaatctccttactcattgctatggtttgaatatttgtcccttctaacactcatgttgaaacttaatccccaatgtgacagcattgagagatggagtcttaagaaaggattggggaggaaggtgaagcaagatggcagaaaagaaggcttcaccaatcatcccgccctgcaaggacaccaatttaacaactatctacacacacacatacacacactcagacacaaaccatcttcaatagaaacaaaaatgaggtgagccctcagaattttatatcactgaaagatgcaccaaagaggcagaaaaaagtcttgaatcacagatgtcacccctcccccatcctctgggagcagcagcatggtacagagagcatttttgtgtgctgggggagggagggcacagcaattgtaaggcattgaactcaatgctttcctgttagagcagaaagaaaaaccagaccaaactcagctggtgccccctccctcccatatacacacacagtgggagcagttaaatcagccctagctagaggggagttgcccatcccagaacttgaattcttgcaaaccttgccactgagggctaaagtgctctggatgtctaagtaaacttgaaaagcactgtaggccagagaactgcaactcttaggcaagtcctaatgctgaactcagcccagagacagtagactaggggtgcacacaactgactgagactccagccgggaccgctaagagagtgctggtatcacctctcctctaaccccaagctgcacagcttgtggctctgaaagagacacattctttctccttgaggagagatgagggaaaagtggggagaactttgtcttgcatcttggatatcagctcagccacagcaggatagggtgccagtgagagccgtgaggcccctttttctggccctagctccaggatgacatttcttgacacaccctgggccacaagggaacccactgctttgaaggaaaaaacccagtcctggaacgattcactgcctgctaactgaagagcccttgggtgctgaataaccagcagagatacccaagtactatgttgagggccttgggtgggcctctgagacttgctggcttcaggtaccagctcagccacaggtgagtagaataccaagcactctagattctagaacttggctcttggatggcaattctggatctgccctgggccaaaggggagcccactgccctgaagggtgattcccaggccaagcagcattcaccacaagctgacttaagagctctttggccataaaggaacattggcagtagtctggcactactctccatgtcctatggtggtgatggctatggggtgaggctcctctgcctttggaaaggggatggaaaagtgggaagaactgcatcttgtggtttgagtgctggctcacctgcagtacaacagaacaccaggtagacttctaaggctttttactctaatctctgactcctgaatgacacctatggacccactcagggtctgaggatacttgccatcctgaatggaaggacataggcctggtttgctttgccacctcctgattatagagtcccacggccttgagagaacatagggagttactaccagggagtggttacagcaggccttgggtgagacccaattctgtgctggcttcaagtctgacccagcacagccagagtggtggtggccacagaggtgctcatcttcctccccccgacacccccacaactttaaatggctcagaacaaagacattccatttgtttgggagaaagtaaagaaagagaaaagagtatcttcctggtaatccagagaattcttccaaatcttgtctaagactatcaaggcagtacctttatgaggttgaaagaaccacagtgttactgggcttggagtgcaccctaaaacagatagagcttagatcacaatacccaagtcatttcaaatatttggaaagccttcccaagaaagacgagtacaaacaagcccagacagtgaagactacaataaatacctaacttctctgcccagacaccaaagaactctataagcatcaacaccatctaggaaaacatgacctcaccaaatgaactaaataaggcatcacagaccaatcatagagaaacagagatatgtgacctttcagacagagaattcaaaatagctgttttgaggcaactctaagaaattcaagataacacagagaagaaattcagaattctaccagataaatttaataaagagaataaaataatttaaaataagtagaaactctagagctgaaaaatacaattggcagactgaagaacacatcagcatttttaaacagcagaattgatcaagcagaagaaagaattagtgagcttgaagacagactatttgaaaatacacagtcagaggagacaaaaaaatgaaaaagaataaagcatgcctataagctctagaaaatagcttcaaaagggcaaatttaagagttgtcttaaagaggaggtagagaaagagagataggggtagagagtttattaaaagggaaaataacagagaacttcccaaacccagaggaagatatcaatgtgcaagtacaagatggttatagaacactaagtagatttaccccaaagaagactacctcaaggcatataataataaaacttccatagatcaaggctaaagaaaacattctaaaaccaataagagaaaataaacaaataacacacaatggagctccaatatgtctggcagcagacttttcagtagaaaccttataggcttatgccaggagagagtggcataacatatttaaagcactgaaggagtccaggcatggtggttcatgcctgtaatcccagcactttgggaggccaaagcaggaaaattactcgagctcaggagttcaagaccagcctgcagaacatagtgagatctcatctctattaaaataaataaataaacaaaattagccaggtgtggtggcacgtgcttgtagtctcagctgttcagatggctgaggtgcgaggatcacttaggcccagcagatcaaggctgcagtgatctgcgattatgctactacactccagcctgggcaatagagcaagaccttgtctcaaaaaaattaaattaaattaaaaagtactgaaggaagaaaacttatcctagaatagtatatctggtaaatatatatatttgaatatatatatacacatatatatatttgaatatatatatacacatatatatttgaatatatatacacatatatatatttgaatatatatacacatatatatatttgaatatatatatacacatatatatatttaaatacatatatacacatatatatatttgaatatatatatacacatatatatttgaatatatatatacacatatatatatttgaatatatatttgatatatatccttcaaacacaaagatagatcttccagagagaaaatcaacaaagaaacattagacttaatatccactatagaccaaatgaatctaaacaatatttgcagagttttcatccaacagctgcagaatacacattcttttcctcagcacgtgaatcattctcaagaatagatcacatgttaggtcacaaaacaagccttaaaacattcaaaacattgaaataatatcaagcatcttctctggcctcaagatgaattttgtaaactatacaaatacatggaagttaaacaatatactcctgaatgaccagtgggacactgaagagattaaggaaattgaaaaatttcttgaaacaaatggtaacagaaacacaacatatgaaaacccatgggatacagcaaaagcagtactaagaagtttatagctataagggtcaatgtcagaaaaagaggaaaaacttcaaataaacaatctaatgatgcatcttaaagaataagaaaagcaaaagcaaaccaaacccaaaaatagtataagaaaagaaagaataaatatcagactagaaataaatggaattgaaatgaagagaacaatacaaaagatcaatgaaacaaaaagttgtttttttgaaaagttaaacaaaagtgacaaacctttagccatactaaataagaaaaaaagatagaagatccaaacaaataaaatcaaaaatgaaaaaggagacattacaactcatgctacagaaattcaaagaatcattaatggctgctatgagcaagtttatgtcaataaattggaaaacctagaagacatggatgaattcctagacacatgcgacacaccaagattgaaccaggaagaaatccaaacctgaagagaccaataagaaatgagactgaggctgtactaaaaaggctccaagtatagaaaaccccaggaccagatgccttcactgctgaatgctaccaaacatttaaagaattaataccagtcctactcaaactattctgaaaaatagaggaggagagaatacttctaaactcatccatgaggtctgaaaaatagaggaggagacaatacttctaaactcatccatgaagccagtattatcctgataccaaaaccagacaaagacacatcaaaaaaaaaaaaaaccaaaaactacaggccaatatctctgatgaatattgatgcaaaagtcctcaaaaaactacaacaaattaatcaatgtgatacattacatcaacagaatgaggaccaaaaacatatgatcatttcgattgatgctggaaaagcatttgataaaattcaacatcccctcatgataaaaaccctcaaaaagctggatatagaaggaacatacctcaacacaataaaagccatatatgatagacaaacagctagtataatactgaatgggggaaaactgaaagcctttcctctaagatctggagcatgacaaggattcccactttcaccactgttagtcaacacagtactggaagtcctagctagagcagtcagacaagagaatgaaataaagggcatccaaattggggtggaagaagtcaaattacccttgtttgcagataatatgattttatatttgaagaaacctaaagacaccaccaaaaacttttacagctgataaattcagtaaagtctcagggtagaaaatcaacatacaaaaatctgtagtatttctatatgccaacagtaaacagtgtgaaaaagaaatcaaaaaagtgatcccatgtacaatagccacacataaaattaaatacctaggaattaacttaaccaaagaagtgaaatatctccataatgaaaactataaaacactgaagagagaaattgaaaaggacaccaaaaaatggaaagatattccatgttcatggtttggaagaatcaatattgttaaaatgtccatcctacccaaagcaatctacagattcaatgcattccctatcaaaataccaaggacattcttcacagaaatagaaaaaaaccattctaaaatttacatagaaccacaaaagacccagaatagcgaaagctatcctaagcaaaaagaacaaaactggaggaaccacattacctgacttcaaattatactacagtgctatagtaaccaaaacagcatggtattggtaaaaaaaaaaaaaaaaaaaaaaaaaaacagacatatagacctatggaatagaatagagaacacagaaacaaaccagacaccttcaacgaactcattttcaacaaatgtgccaaaaacatacactggggaaaagacagtcttttcaataaatagtgctcagaaactggatatccatactcagaagaatgaagctagaccccatctctcaccatatacaaaaataaaattgaaatagatcaaagacttaaatctaagacctcaaactatggaacgactacaaaaaaatactggaaaaattcttcaggacctcagtctggtcaaaaatgtattgagcaatattccacaggcacaggcaaccaaagcaaaatgtacaaatggggtcacatcaagttaaaaagcttctgcacaggaaaggaaataatcaacaaagtaaaaaaacaacccacagaatggaagaaaatatttgcaaattacccatctaacaagagattaataagcagaatatataaggacctcaaacatctttatagaaaaaaaatctaataatccaatcaaagatggacaagagagttgaatagacatccctcaaaagaagatatataaaagacaaacaggcatgtgaaaaggtgctcaacatcattgatcatcagagaaatacaaatcaaaactacaacgagatatcatgtcaccccagttaaaatggcttttatctaaaagacaggcaataatgaatgctgacaaaggtgtagagaaaaaggagccctcatacactgttggtgggaatttaagttagtatgaccactgtggagaacagtttggaggctcctcaaaacactaaaaatagaggtattataggatccagcaatcccactgctgggtacatccccaaaagaaaggaaatcagtacattgaagaggtatctgcactaccatgtttgttgcagcactgttcacaacagctaagatttgaaagcaacctaagtatccatcaacagatgaatggataaggaaaatatggtacatatactcaaaggaatactattcagtcattaaaaagaataagatgctgtcatttgcaacaatgtggatggaactggaattcattatgttaagtgaaataagccagcacagaaagacaaatatcacatgttctcactgatttgtggtatctaaaactcaaaacaattgaatttctggacatagagagtaaaatgatggttaccagaggctgggaagggcagtggggatgtaggggtaagtgggaatggttaatgggtacaaaaaaaaaaagaattaataaaacctactatttgatagcacaacagagtaactatagttaataataacctaactgtacgttttaaaacaactaaaagaatgtaattggattgtaaatgcctgaggggatggataccccaatctccatgatatgataattacacattgcatgcctgtatcaaaacatctcatgtatcccataaatatatacacctactatgtacccacaaaaatttattttaaaaacagtataaataataaacaacttttaaaaataaataaaataaaatacaatcataaagactttaacaatgtaaagaagagtaaaatcagtgaggactgctgtaatccaggaatctggaagagcaacagcacagaagaataaaaggaaagatggaaataaaaataaaataagtaattaaattaaattaaaatacaataaatgtatctacccccttggccttggtaatttaaaacatactctgaggagacagttctctatttttatctattatgtttgtacagcaggaaaattaatttccataaaacagagtaaacctggtgaaaggtctttagtgtatttaatctaaatggaatagtttctctttatcatttttttctagggcatattcttccaaacacaagaaattttagtgcaaatgatttgagggcttaatcttatatggaggcaatttaatagagtttcaggaatctctgtagaaaatctagaggcacatagaaactctggtatttggttgctttttaagtttgaaaataaatacaactgtttttctaatttttttttgtctttttgccagtgggttttttacatgaatctgaaagggcttctgagggttatttatttatttatttttgcctttgagtttcattgatgatgctttttagtctcttataggtctttctgtgaatgagaagttagaattttgatttcttttgtaagcctcttctttccacaaatactatgactgctttctggccaaaatgggaaatttccagatttttctcttagatattttgggacatcctgtcctcaggacaaagcaggaaaaaagcccactagttgggggggtaatttctggtcaccaattccaaattatatcgagtaataccacagtagtttaatataagctaaacagaaatggaatttcttcttggtcattcaactgaggaccccactctgtggggtctaacctaaaagagtaatctgatttttctcaggtacacatggtaagggttaacagacaagcaaaaaatatggtcagactcatccgatagtctctactggaaaatacaaagcatttctgagctcaagttgggagcaatggtatctttgggcagcagatatggagaaaaatctgaaagtacagtcatgtgtgaattcagcccacatcctatattccacctccattcttcctaggatcttacaaacaatgccaaattgttccacaagaatgaccagactcaaaagttttaaataagtgtttgccatttataagaactgcttttcagaaagaaaagttgtgggtgctaattactgaggataggaagatgacagaaaagctgggtaaacagatttggagttaatttttgggacatcttgagcctgaaatggctgagtaatccaagagattagaacaaatatgtaattcgatatgtaagtcacagaacaagagaaaaatcctgctgacttcatattcgtgtttctttctcaatacacgtggaggcagggaaatagcaatctataccttaaacctgaaattcacaacaatttttcttctccaaatacttccaaagtagaaagtctggaaacattatatctcaactatgctactgaatccaaggccaatactttcttccaaattttaaattttttttctttttttttcttttttttgagacagagtctcactccatcacccaggctggagtacagtggcaccatctcagctcactgcaacctccacctcccaggttcaagtgattctcatgcctcagcctcctgtaaaatttgtttccttgtcatgctacgtaggccagcaaatttatgcattcctccttgaaacctggcttctgtcaaaaccccaccctctgctaacaaacatgtctaaatgtcaatgaaaatctctagtatataaacatttaactttcataccaggcttttaagcttcatgcaaattaaaagtcacacatataaattagtcatttagtgcatggccttggatccattggtttaggctgggattgtcattgatctaagaaacagtgagcaaatgccagcaaagtatataaaaaaaatagaaaaagtagtgaaaatgacaaagaaatattacagggcagatggcagaagaagaaactccaaatatgactaatatgactaagaaagaacatgcagagaccagaagccaaggcaaaaaaaaaaaaaaaaaaaaagcaggggggtgtttcaaaggattgagaaatgttgtaaaactctggctaaaggcaaagcaaatggtaaaatgtaaagaatgcttacatttttcaacaagaaagacactggcaaccaaaagcaaggccatttcagtggagtgatggcacaaaaagcagatttctcttagttgaggtaaaattgggactctagactttggagaacttagttgggaacactagttctagaagtctggatccaaacagggggagaaattagacattagccatagaagaggagtatatataacacaatgaacatttcttagcatttcaagtactagttgcgaactaagtttgaacttggaggacaatattcctcaattctcaggaatgtatggacatcaagcacagtgtccagcctctgtgcaaaatcgctttctagcaccataaccaccattacctctgtcccacatccagaaatggtcctctagcctcaaagcaggaagaatgcccaatgacaaggctgtttattctgctttccacttagaaagttttaccctagtttgtctaacaaatttctatactcactttcatccctctgtcttgttctggttcttcctggggactcatcattatggcaaacataccaggttagttctctggatatcaaaggcagctctattgtctctttccttagcctacaacgtttacttggaggacctgatccctctacatgttcacaggagcatccaaactcaatacaattgtcatcttccctttgcagtcaccagaatggtatcaaaacagaacagaaaggtgaccttctcctttctaggcacacctgtactaagtgatgccaacatcttattggctttattggccagtggccattcctatactccatagcttcacagctctcagcttaatctctccagaccaatgatgactacccacagatgaaagacacaccacaaaaaggaatgcattttttatagggaaagcattccagaatggaggagaaattactacagaggagacgttggtgatattcaaatgtgagagtagcttgaactgtttgtaactgacaagttggagttagagtcgtaatcctccttcacatttttagaactggttattttcacagaaagtttcaggcagcacttttgatcatttgggcaggttaagtattggatttcatattctctgcaggcgtttctgcacatgccttggtaaagctcacatggattccaaggctctcggctcttgccattgtgggatctgaacaggccacctgggaaagacatggccatgtttagtttccatgcagcagtgataatagggtgatgaagcatgatttaaaggaacacgccctaagactattaagggcacaagatctggaatcaaaactacctagattcaaatctgggctctgccatttaccatctctccctcctcaagcaagttacttcagctctccagtcctccattgcatcatcttcacaacaggcaaaataatagagccaagttcctaaggttttagtaatgactaggttcatgtatgtagtattttcaaaaaagcatctggcacataacaagtaattgaatattagatgatgtagttgatatgaaagtcttctcctgagagtatgaggtttcaaggtatgccactgtgagcacatatgtccccaagtgcctacagagatctgtgaccctcacacacagctaatcagaggcagccaggatctactctcagatagcacacaaatatttgagcctatgtgcatgcatgcctttatcctctgaaacataggagcaaacaagtactacaactgtctctctttgtacattggccttacagaaacaggtactgtgcatacacaggcagcatactggcatatacacagacccatgtatacaacccactttattcacagatccacattctcacataaattgagcacatgtgctcactgtacaaaccttcaccatgcactttccacatattgctaattgcaccttgatagctatgtataagtcatccaggtgtgtacatgagtgaacataagctctttgcctgaaaataccccagtgacaaagttcctgacacttaatcagcattctataaatattagtcatcaatggtattacttacctatttgatgttctacagacaaaggagcaattagaaagaaatattaacaatcactaccatgtactgtggtatggtccagcatcaactatgtacaggcattttacaaatgatagctcactgaacctcataaaaacctgctgttatcttcactctttagatgaagacactgaggctcaaagagatgctttgttttgtctgcattctcatagcttatacttgatcaagccagtattcaatttctggtctacatgacatcaagcctatgctcttttctctctgtgtcacattgcctctctgtgataggcacagagaagacggcatcatcctgcatcatgtctacacacacagggccttctacagatttcaaccgagttcaaaatccttagcttggcattcaaggaccttttcaaccatccccccactccctcattccacacccatttatgaacactctgtgtcaggccatggactcagtgctaaatagatagaggtctccaattaatcaaatttattcactattaacattaacgaaaatgggacaaagcaagtataatgttatttcttgcatggaaaaaatgaatactttgctaatttttagattagagaaagtaaaatgcccaattttaggtgaagttggagaacgggaagagaaataaagaagagggaaatgcctccacggcagatgtcccataacatttgggtactggagtgtgtataaactgccccaggaatccagagagggatttcaactgctccaacatcaaccagcctgctggtcaaccagagaaaggaggttgaaaatgatactgattcatccatgctccagcacaatgatatcactgtgtttcccaccttaatcttcacccttatcatgggacctgcacactctctctctctctcagcaccattatacttatgggagaagaagattgcaaagggcctcccccaagtgatatccatactgttctggctaacacctgacctctaggacttttcctttctaccaaacacactggagggcagttggagacccaagatttcctgtctgcagtcactggagggatggatagaaacacagataccaagaatgagcaatgggcaagctgccttagaaagttggtcaaggccaccccaagaggattctgcctacagtgatttaaataaattttttaaataaaaataaagattttgtcatagatagttacagtttcttactcctacagcttttctaaccttagattgccctgcattgccccaaattttgacatccacatcaaattaatgttaactttgataatctctccatcttccgattgaagtcagaggaccagcttttgcatttcagcatagtctctggccctctgcaccatgctatattttaaccctctggacccagtctctccatgtcagaaaatgggaatgggagactttgcaccaaattagaaagtctccactgtgtttgtgtaaaaaagaggttaataagatgtcatacttcataataacctggcatatttttacgtatattcatactaagtctctagaatttctgattcagtatatctaaggagaggccagagcaagggtgctttgcaagagttccccagaaaatactaatgggctcctgtttgcagtgaaagccacgattctgcctagccttctcacattcagctatagacattgcccagctcatttttccacattggaagtgtattgaaagcaaattaaactgtcttaagtcaaaaaacaaaaggtatcctctggacctttttaaaaattccatcccaagccaaaatcaatgtgatatattatttctctgcctgctgtgcaaccaaacatgatcctctcccatccaatctctaaggttatttctactcatatatgtttattagccatgattcattacatattcattcattcaataagtatttgctaaagcctactctattcaacacactcagctcaacatcagaaatgtgtagatttaaaagacaaagtcttggctttcaaacagtttaatttcatatgcatacatttgggaggataaaaggaaaaatttgtttggattgtcctaatagaaaatgttgtccagaactgttcctgctcataaattctgccaagtaaaagtactcaataattattaaggaagctacactatgtacaactcttgaagcatagagtgctgtcttcatttttgttgttgtttgtgtttcttgcaaacccacttgtgttttctaccaccattagaaatgagaactgagctttactgagcatgagaacaaatgtctcttgagcaaaggaataaaagaagctgagaaataaggaggcatgagaatgtgaaatagaaggaatatgagaaaagagaggaggaaaagaagaagaaaaacagagaagaaagaggaagaggaggagaaacctctagatcagatgaatctgaactcactatcgaggaaggaagaacaatcttggttttctatagggtgggctgagactgctcccatatctctctgtacatgccaagatttgacaggagacaattccaaacattccagtctcctgacttcctctatctcagccatctacagtcacatctattgttcttcagtgcccttgaaaatcacacttaagaaactttcttcagaatttgaaaataatactggatatttttcatccagtgtttattctccccatttccttatttaaatcactttgttgaagtacaattggcacacaaaaagctatacatatttaatttatacattttgatgagtttggagataagcatacattacacccatgaaaccatcatcacaatctatgccataaacctatccacgcctaaaagttttctcccaccatcttatttattatttttggtacatcaaatcttattttaagaacacttaacataaaatccactcccttggtaatttttgaaatatccaacacagtaccgttaactataggaactgtgttgtacagtagatttctaggacatattcatgacagtatagtctcttcaataaatgtattgggaaaactaggtatctagatgcaaaataataaaattggatatttatcttacaccatacacaaaaacaaattcaaaatggattaaagacttaaatctaagacctgaaactataaaactcctaggagaaaacatagagaaaaagcttcttgacgttggccttgggaaggattttctggatatgacaccaaagcacaggcaacaaaagcaaaaataaacaaggggattgcagcaatctagaaagtttctgcacagcaaaggaaacagtctacaaaatgaagaaacaacctatggaatgggagaaaatatttgcaaatcatatatctgagaaggagtcaatattctccttatttcaatagccacaaccctgctgtgatgaattcaactgtcttactcaagcttaatcacccccaaacccaggctaagtcaatccctgcccagataaacctcacatacccatgactgaataagatacccactttaggcaaacactaactacaactcaagccctacctcttctaataaccaccaaaagcccaactgcaaaacatacaaacataacactatccaagccacccaaccccattcacagcatcaatctaaaacacaacccagctacaaacctctctataccccaactcccagttgcaccaactctaccccagctccattcaagaaaaaataccatttcctctctagaatgcaccaaaacatctattcagcccaacctataaatacaattattcaccccatgctcatccccactcactttttggatattaccctatctctaaggtcttacaacctccccacctcaactccctacccaactccaaactgctatacccctcctatagctcctcaacttgcacacagtctctcacacctaactcatgaattaagcccccatcccaatgacagcactacctaaaatgttccatgcttagactgtccactatgccaggatcaacaacctcttcaatttgtcttggcagagcagaaccaggggagatctttacatgaaattaaccttgggaataacatctgtgacccacctgagaccagaaaaggctttaggtgttgcccactatatgtgagtaggagtcactgcagaggtcaccaagataccagtaccacatgcaagacgccagaacctttgagagaggcctgagttacctggagtcttttgagccaggatcataaggatggcaatggtcattaaacagggcttcatgactgacatgttccaccagaatgaagggctgtgttgcaggtgaccaaacagagatcactgtagcagagcagtagcccgcctttattagttttggaaatgcgtcagggttctgtgcagtgaactaaaagggatgggagatacctgatgtcaggcaggaagaaggacaacatgtatcacttatctgagctggatactctgtgtaagcgtgggagacttgccagcagtgctcatgtctgtgtgggcctttcttcccattaagaaataaagacaaattagagccagttggcattttgtgtgaaacgaatttgaatgaatgaatcaaccaagcaagcaagcaaacttgaaaaaacttataaacaattagataagaaataagcacgtgtatacctatgtgaggcacgtgtatacctatgtaacaaacctgcacgttctgcacatgtaccccagcacttaaagtataattgtaaaaaaagaaataaataattatttttaactgtagtcaccatgctgtgcccacagaacaccagaacttattcctcctatctaaccgaaagtttgtacccattgaccaatgtctcccctttccccatccaccctccctcgaggctctggtaacaaccatgctaatctctacgtctatgagttcaatttttttagattccacatctaagtgagatcatatggtatgtgtctctctgtgcctgctttatttcacttcacatagtgtcttctaggttcattcatatgattgcaaataacagaattttctgttttttaaaggctgaatagtactccagtatctatagttaataataatgtaaagagctaaaagaaagatttttaaatgacctcatcacaaataaataataaatatttgaggtgatggacatgctgatctctcaattaattgatccctttattattatataatgaccttctttgtctcactttgtggttttttacctaaagtctattttttctgttgtaagaaaagctgttcctgctcttttctggtttctttttccatggaacatctttttccatcacttaactttcagcctatgtgtttccttaaaactgaaatgagtctcttgtaagcaaaatacagttgagtcatttaaaaaaatcaattcagccactccttcaattggcaaactgaatccatttacattcaaagtaagtattgataggtaaggatttacttttgccattttgttcattcttttctggttattttatacatcctttgttcctttcttcctcttttgctatcttcctttgtgattagattattttctatattagaatgctttgattcctttcttcttatcctttgtgtatctactgtcagtttttgctttgtgattactataagggttacacaaaacatatgttgttataaccggctgtttaaagctgataaccacttaactttggttgcaaaatatgattctacatttttattgtatctctcctgataatttatgtttctgatgtcacaatttactgtttatattgtgtgtatcccttatcagattattgtaacttattattaatagttttgtattttgttttatactcaatatattagtgacttatcatctttacagtattagagtattctgaatttaactgtgtacttacttttaccagtgagtttcatacttgcacctgttttcattttagttattaacatcctttcctttcagcttgaaatattttctttagcattccttgatagactggcctggtagaaatgaactctctcagattttgtttgtctgtgaaagtctttatcttttcttcatttcagaagcaaggacttgctcagtaaaatacttttgtttggaagcttttttccttcagcattttgaatatatcatctcactctcctgacctgtgaggcttcagtggagaaattgactgacagctgtattgagtctttcttgtatgcgatatgcttcttttctcttgcttttttcagaatttttttctccctgatttttgatagcttgagtataatgagtcttggctaattggtcttgagaaatcagtatctatggcagccatagccttatgaaatgcatttcttaaataataagacccgaaagtcaaaattattccttgatccatgggctgtaagtgattattgtgttagccagcataaaaccaacgttaatctccttttacatcttcatcagaggtcttgggtactaggtacattgccaatgatcagtgatattttgagagaaatttttttctcggcagtaggtctcaacagtgggcttaaaatattcactaaaccatgctgtaaacaaatgtgctgtcatccagactttgttgttccatttttggaacacaagctatagctttagcataattcttaaggaccctaggatctttgaaatggtaaaagaacattagtctcaactttaagtcaccagctgcataagcccctagcaagagagtcagcctgtctctcaaagcttttaagccaggcattgacttctcttctctagctatgaaagtgctagatggcaccttcttacaatagaaggctattttgtttacattgaaaatctgttgcttagtgtagacaccctcatcaataatcttagctagatctcctggataactcgctgcagcatctacatcagcatttgctacttgaccttgaattttttttcagaaggttgttttataactttatttggtgtatttgatgatcaacagttcttatccacattgactttctgtagatttttgaaagtggtaacaggtacgcaggtaaccaaagtatagagcttgtttggtgaatcttcatcctcattacattttctggacaactgtacatggatatggtataggacattctttattccttaagcccaaacagctttgttgaacctgatatcaatcctcacatttggagaccccatctcttcatggaaaatttctggatctcattgagtgcctgaggggcacactttaaaaaaaatttttttaattatactttaagttctagggtacatgtgtacaacgtgcaggtttgttacatatgtatacatgtgtcatgttggtgtgctgcacccattaactcgtcatttacattaggtatatctcctaatgctatccctcccccctccccccaccccacgacaggccccagtgtgtgatgttccccaccctgtgtccaagtgttctcattgttcaattcccacctaggagtgagaacatgcggtgtttggttttctgtccttgcgatagtttgctcagtttgatggtttccagcttcatccatgagggacacactttttaaagttcactccatggatgcacttgtgaatgtcgatggtgtacttccaggtcaccacctcactgatggcaatctgtcttcatgaggcgttagaggttgatgttctaacaaacataaaagcaggcaagcagtagtactcagctattacatgaacttttaaattagccatatctttacatagatatagtcaatatctatactgatagtaaatatgtgtttggggcatgtcatgctacagaccaaatttggaagaacagagtctttctaacattaatgagaacaaaatatcacacataaatggactgttgatttgttagagtcattgcaatttccccaacagatttatgttcattgtagaactcatagataagatgaattatctaaataaatttgcatgaaaatagctactaagatttggactgaggaaattgaagtcccatcacatctatggggagtcctattcatggtttcagtaatatgagactccccccaagttagaaaattagacatcaaggaaagctaaaaagagcaccacagaaaatatgagaattacccaatgagatattcctgtactggtttttcatgccatccaaccagcaatatcacttaaacaaaaggaatatactgaaaatcttggaatcttaccactcctgtaataaggtcaaataattcggtaaataatacgagcatgtgctgtctgtcagaaaatttctttacagggaatacctacagtaagccaaggaagcccactcaggccaaagttcccaggacccggtggcaaatgaatattatagagcttcggtcatcacaagctaagaaatactctttagtatgatgcctggatggacagaagtatttgctttggctcaaggaagtgctcaaatagtgatcaaggccttactaaattatgacatcccagtcttcggaattcctgaacatagagaatctgacatggaaaatcattctccctgtggcaaatcaggggctcagtaaaaccctacaaataccaataatttatacttcctatcatccccagttttctggacaaatggaacaaatgaaacttactctaaggaattatttggctaaactatgccaggtgcagtggctcacacctgtaatcccagcactttgggaggccgaggtggacagatcacttgagcccaagagtttgagaccagcctggccaacatggcgaaaccccgtctctacaaaaaatacaaaaattagctgggcatggtggagagcgcctgtaatcccagctacttgggaggctgaggcaggaggatcgcttgaacccaggaggcagaggttgttgcagtgagccaagatcgcgccactgcactccagcctggccagcagagggagactccgtctcaaaaaaaaaaaaaaaaagaaagaaagaaacgagaaaagaaaaaagaaaaaaaaaccatttggctaaattaaatgaagccactggcttacagtgactcagagccttagtatttgttctatgaaacttaaggttaactccctgtagcaagcatgatatttctccttttgagttaatgtttggaagcgctatgtgtttagcagtgaagcctagcctgttactttatacgaaggaaatcacagagttttctcatttccctaggcttattacgccatcgtgtggccaaaagatggaagaatccccctgaaacggtatgttgctaatacagactaggagacaatctacactgaacttacccaatggcaggctagattatcatagtgctgagaaggacactaccaagtgttgctggtaactcacatcactatcacaggaaggagcaacacacctggatacgtgctttacctgtgagaaaagcatcagtgactgaatagactgtaactctactattaaagttacagtctccagaaagtttgactcatcattgttttgagatctgtccatgttgtgtggagatagcaattgttcactcatttttattatggcatagtgttccattaccataactaatttatccatactactgatcataagcattgggttctttctagtttggggtcattataaataatgctactatgaacactcttgttcgtaactttttatgcacatatgtaggcctttctattggggaaattgagaggtcatagatatgcatgtgatcagctttttaatctgctgtcaaatagcttcccaaagtggtgtaccattttaatacacccccactgatacttgatattgttaatcttcattaagtttagctaatctctgtgtgtaatgatagctcattacagttttaatttgtatttccttaatgaccagtggaattaagagctttttcatatatttatgggtcattcggatgctctgttcaacactttggcttttttgttcttggagtgcgtgtctgagtttttcttaatgaattgtaaaaattcttcatgtattcaagacacaagatctttgttggttataggttttgaaaatagctgtcacaattttgtggcttaacttttctgcctcttaatgacatcttttgttcaacagatgttcctaattttaatgaagtctaatttatcaatctctttctttacagttggtacattctgtgtcttaagaaatctttacttaccccaaggtcttaaacatactttcttatgtttgttctaaaaactttattgttttattattattattatctacatggaactgattttaggtgtgaaggaaagatcaactgataaccatttattgaaaataccatccttctgccattactctactgttctacttttctcatggaatcatacatgattagatctctttctagactctattttgttccttagtttctttatctttgcatcagtagtacattttactaattactatggctttataataagtcttaatatccaggaatgtaaattctctaactttgttcttcacaattatattggctattctttgcccatttatttctatcaatctttgaatttgtttatcgatttccacaatctgtggaactagctcctactttttagtccttgaatttatttcttattttttcctaaaaacaagggcaggctctccctccactgttgtaataaatatttgcattattaatgagagtccttggttttttttccaatttttttttttttttttttttttgagatggagtctcgctctatcagttgcccaggctggagtgcagtggcacgatctcggctcaccgcaacctctgcctcctgggttcaagcgattctcctgcctcagcctcccgagtagctgggactacagtcacccgccaccatgcccggctaatttttgtatttttagtagagacggggtttcaccgtgttagccaggatggtctcgatctcctgacctcgtgatccgcccgcttcggcctcccaaagtgctgggattacaggcgtgagccactgcgcccggccttttttccaattttaaagggactgtacctaaagatccttgaataaatctaacatttgccacaaaattttggcatgtaatctttagcatgtttgatagtgctcgtctcttcctaattagctaaatattctattatacttaatttttgaaatttataaaatattttctatgtatcatttaagaatcatataattcttcttttttctattaggctagagatttacattgctagagtttctgttgttattcatcctcatggcttccagatagatcctaattgatatacaggaagtatatttttaacacagtattaggttccattattcactattctatttgggattttggcatatatatgcagaggagctacagcctattgtttctctttcctattgtttttacctgcctttgaagtcaagataacactgacctcctaagatcatttaggcagcttttacatttcctctattttctggaacaatttgtgtaatacaagaattaactgttccttcaaagtttgctagatctaagggtattatacaattcttctataatttatgtaactaggacacatttgagaataaagggggtattaataataattattccaagacaaaagaacttgaactattttaagcaaagcaaagtagaactcaatgttaatactttatgagtctgagacttagtgggagggggaggcctgtcagtaccatttcagtgtctttatgcttggttgatcttctcaggtttgcacttcttccagtgctagtcttgatgggctgtatttcctttaagtatttttcaaatgtatcatgtatatttcctcataatagagttttattattcttaatctctgtggtgtctatagttatttccagctttttaactgtttttaattatttccatttttttcttgataagattatcaaaaatctatttatctttagcaagaattaagattccagttctgttatttatattccagggtattcgttgttattatagtccattgggttaaactcaatgaaatgcctgaacttattatgtcatttctcttggtttctctagatatcctcttgctgtttttctagcatctaaaatttaatgcttagcttatttttaaactaatattattacaaaaggggtatattttattgtatgttaaaatacagataagcaaaaaatgaaacaataaaaacactatatcactattacctagagattgccacagttaacatcttattgtatattactggatctttttctatgcatagattttattaaaatgaaatctcactacacattgtttcataatctgctttgtttcatttataatcttcatttttcaattttaacgcattttgttcatatttaacgcccaggctatattcaaatttccccaattgtgctagaaatgttccgtgaagctggtatgcttaaatgactgaatgtgatttatttatatccctttgatctctttcagtctagcacagtccccattttgtcacactgatttgttgaaaacattgagccagttgtttttacactgatccaccttctgattttctagtttccttttgcttcctcaccaatttattttgtacgtaggaagttagttcttatggctttattgatgtacactaataatcttggcaaaaatgtatcagagctgaagctgtgttctttatactgcatcacatcagaagtcatttaatatctggatgtcccttgctattcagattcacaagtgaattaaagtgacgactgtctggtctttttattggacagtgttgatttttcactttcatattcaaattggtctgtatgttgttacttttgccaagtaacaaatatctggttccatgtcaatcacatccttaatggttttaacacaaattatggtccttgcctgaatcaataaattctttaggcgttgcagaatacaattcagtaaaatatagctttccctcatcaacaagagctatttgattactagaaatacagctcttactggagaggcaggataaatgcttaattctttcaaattacttattggtctttgaagtaagtagtttgcttagtagctgcttcaaatggtgacatatgagtttttctggttatcccatctctgagtatctttagacaatcatgccttttcattgattcattgtattccagtccattttatttgttactatttttgatgctcaaattgttataaccttatcaagtagagatttcctctggctggattatatatccctttacatgacccattcgttttttaaagctttgatgatttctgcacaagaaaatgtcctgggctcacactgtaagtccacagcactagaccagggttcagccatttttctaaatggccctggttgctttgagtgaagacttgacttgcagaccaaaatctgggcacttatgctcattgctaatacggtgctattggttctagtcaatttaagttggaaaaactaaaatatttacattttaatgcttgtgaggtttctggattctgtttagccacctaaatttaggtctccttacaatactccaaaagtcatatatatcatatgaatcaataagaaaagcatataaaattatccataacaaatgcctacaatataatcaaaagacagagcttccatatatacaattataatttgtcaagtaacaatggcaaataaataaggcagatattcttaggttattcattatgttgatatgtgataagatgtcccatatcactcagcctgtgataatattttataaatgttcttgtctctatttgagaacaatttgtatcatttggatgcagtgttctgtatattagattaatcctactaactggtgattaccacatctatattcagaggaggatttctaagtccccgactttaattatggattcatccattcctctttatttctgatgatttttatttacatatatttccatgctgtattaataaaggtacaaaaatatgtttggaaaacatgtcttcccagtaagttgaacattttatcactacgcagttatactttttatctcaataatgctttctttcctggaagtctattttgtgtgatattaatttagctaaactgctttctttgggttagtgtatttcctattcatttcaactttatttttttaatcccaaatactcatctcctaatttatgtgcaattttaattttatcttattgtttttggttaagaaaaatactattgttattattttatcaatgaatgattgcaaatttgccacatatttacaagtattgaccttctgtctaaagcttctctcttagaatttcctttggtgatagcctattatagaaaattctcctagattttatctgaaaatatctacagtatatcttcattcttaaattacaatttcattaggtgtaggaatatatgtgagagttattcttcctcagcacactgaaaatatagtatcattgtcttcatgctttctttgttgatgctgaaaaagttgctgtcagtctaatatttgctcccttgcaggtaataggacctttttctctagctggtttcagatcttctccttgttttcattattctacattttccctgtgttctatctacatgtgcatttttcatatttaccctggttttgatttattagggttttttttgagtctgaaagattggtgtttttcatcagttcacaagttctcagtcatgttaactggtactattacttctgctcccattttctctcctctttccttctagaattccaaataaacatgtttaggacttctcactatattttctatgtctcttaacctcccttttatttttttaatctttttgtctatctgcactaaattctgaataatttcttctgaataatctcttaattcactaattctctcttcagctatgtctaatgtaatgttaaatccaagtttttattttcacgttatttcaagttatttctatttatttttcagatctgcttcctttttttttttttttgtgatggggtctcactctgtcagtcaggctggagtgcagtggcatgatctcagctcactgcaacctccacctccctggctcaagcaatcctcccacctcagccccctcagtagctaagactataggtgtgcaccaccacatccagctaattttttgtattttggtagagacagggtttcatcatcttgccccaggtggtcacaaactcctgagctcaggcaacccacccgcctcgacctcctaaagtgctgcgattacaggcatgagccactgcacttggccaagatctgcttgctttttatttataatttcaagtcttgattttttcttgaaacatattaaagatgattattttttcttttttttttttttttttgagatggagtcttgctttgtcacccaggctggaatgctttgtcacccaggctggcccaatctcatctcactgcaacctctggcttctgggttcaagcgattctcctgcctcagcctcccgagtggatgggatcacggggacatgccaccacgcctggctaattttttttttttagcagagagggggtttcaccatgttggccaggctagtcttgaactcccagtctcaggtgatctgcccaccttgccctcccaaagtgtgggattacagacgtgagccaatgtgcccagccataaagataattactttctattctgtgactgacaacttcaatatctgaattgttccaggtttgagtttactatttattctttctgctgcttctcattcataatgctttattttcttgagagttttgtgatttttgtctgcgaactgatcattttctttaaacttttttaaagaggtctaggattaagatgagttcttcagagaatatttatgtttacttctgtcaggcaactaagggcattaccagtctgggcctgtgtaaattagattctcagctttagatttttcatatcatcagagtgccatgattcaggctatatactaagtgagggcctgcttgggattacaaaatctcagaggagactcccttgcacacacacacccaatcttctcattaactaaattaaaaacagttcattttccttgcaatccaactggggagtagggattgtttccagctcactgttattgtaaagacgcaattctttgaagtcccatattgatgcaggagtctcttattaggttttttaccactggtactctggatagtaatttccatttctcagttccataaggccatgaaaagcataactcaagttcatatggttcaggaaataccctcaaggtggaaactgtttcagtgtttcttttcctaaaaggactcccttctcaattcaatttcttggttccatattatttaatttttgcaagcttatgaaatcatttaagaaaatatgaaaaatatccattttagagatgttttcagcagaaaagtactcactctgccatggagttcaaggcaaatgcttaagcccaatgttaagctttgttgctcagcatggctactagggaaagaagattctttctgcctattcttgaaatttggttgctatttgaccagtatcttctcttttgctttttctaaacaagtctaaatatgtctgaacctcaaggttatgtgcaacttgagtttttttcaaacttaggtttctttatcctcttataaattagacagtgtcactttataatctccttcaggtaagtactttactgcccataagattatctcatgccccaccagagaaatctttgaactaaagaagtaataaaatattttcccagtgttggacttaccttttaatttgtgtatggtacattttgccatagagaagtaattaaatttaagtagttaattcttcatagctgttttctggttttgtgcttacaaatttccagcaaagtctctctaaatagtaagtaataaagccaacattcatatcccaaaccctcaactatatccattgtaccacaccatctctacatatagtgaaacagctggagaaggctgactcctttctagataatgccagttgcagctgcgatatccattgttctataggtttttgtggggggttttttttgtgtgttttttttttcctttctaatataccagaggtgcataccattatcttggtccatacaaaatttttggcatctttatagccctctttaatgtttatttattgtaatgtttttattcatttattttaaaaataacgagtccttcacaaatacaagagctaaaatagcatcaataacttaaatttaaatactcctgtattcctctaaaatcccacacatcctgcctttccttatccactccccaagaatttaacatatttatttgtatttctaagtagcataatggtaatttttattgtttaaagtttaattttggggagaaaaataaaactgggaaaaaaatagttttatttttaaaagaggtaacaaagtcttctttggtatgcatagtcttctaagatttgtcttttacaatccataatatattattattattaaaattcaactattgtgtgtagctgaattttacttcttttccctgatatgtagctcattctttgaatatatcacaatttatttatctatttgcctgtcaaagaacatttatgttccttacagtttgtagcttacctttttactttcttttgggtatcttttgatggacagaaattcttatatttttacatactcaaacttatcaatgttttcaatataattttcaatacagtgctcacatgaagactcaggttatatatacataaaatttcaagtgcacccgttttcataaaagaaatggagtaagtgaattcctccacagctgtcaccataagttctcagcattttagtctattgaaattcctccacagtgatgctccccttgacaatacatttatttattagcactcatttcatgcttatccttctatgaagggccaggtataataaattcttcagtacctaaataaactaaaaataattccaatatataaacaatgctcaaagtcatcccttgtttataagtatttgaataaactaaaaattatttcttctattttctttggatcaggatggcagcaaaaaaaggatattttttttcttcgctgaagttttggaaagaaggaatgcctttgtgtcaggctagtatatggcctcccacagaaacccaaaacagtagctacatctgctggcctcctggtagatcccagaaaactaccaaaaacttttacagtccttgctgcatttgaatcacagtgcccctgtatgtcccctcccacatccaaacagacaggggactcctccctgctgcctggcatgccttctcagcaggcctcacatagatagggagaataagtgctgcagggagccctcctcagaatgaaactcaaacctgatctaattccgccccagtctgaagggattgccctctcccaatcgccctgaataggaagaccactacgaaatactcaaaactctctcagaatccaccagagcaatgggcaaaatgctgacacagagagaggtgcaggaaggtagtctctctctctctctcactctttccatccggacagagacacacggctgcatcacccaaagcaaatgtcagtaccttttttaagttccttattaccacggttttttgggtaatactttgtatcgccatcagactttgtatcgccaacatcaatttattttcacttctaatatttcctcattgctcagtctgatagtcagaagaaatcttcttttgaatttcaccattgtgtgtgacccactgaatgcctgtgtgaaggtcactttcctttctgaggctcagtttccccatcttcgtcttcttcacaaaacaatctacagggtataacagtgttggtgggatattttttaaaaagaaaacaaaaacactggcagtgattagttcccatatgtagagagaattgaggagcagcgcaagaaaaaagagagtctggatgagggagacgagaaggacagaaagatgattgtgttgactttgaaatagtggagggatgtgagaaactactctcagggtattcttgtggaaatgctcagcttcaagaggtgccctctctgatcataccagcctttttcttcctctagccaacttccaaattctaacatttgaaccattcagtgcctatgaagttctcacccaaggaatttgggaagttatggagaaaggcctctggatattttcatttggaggagggaacagaataaattttaatagaccccgatctacctgattacgtggctccatttaagcctaacacagattcaagttccacacaactacagaccaatcccaagttctgatcactcacacttttgttcaaattgagcctaaactctgtttccatcttaactccaaactccaaccctactctacccaaggtctatccatgtttaaccccaagacaaccacaacctaactttactaccactagctccagttcagcccatcaccctgcctaatccctatatccagattcatttggccataaatttcaccccctctccagactacctcataccaatcctaattcccccaatacaactcctcacctagtatttatcccgaaccatcttccaaatatctccctaactgcaagctcctcttcccactgttcaacaaaattcatccctggtgtccaatatctctcagagatccctacccctcctcaactgggactcaatctcttgcccttaacccttcatctaattgcatattgtatgagtcacagttttatcagttatcttaacagggattatttaacatttaagtgtaatattagtgttcatattaataaatttaatattaactttaatataaagatttgttatataggcatttaagaattgaaaaaaataaagaggacactcagctatcacagatgtagcaactgcaggaatcagctaccaattccagggtgggaataacaagaaaaaaggttggaaccattaaaaataaattagaagcttggaggaagatacctgctgagctgaatttcagatctctgaggaaggagctctgctcagctagaactagtatctatgaggcatcatgaggctggctgtgttggaaaattgcaaattggattcaactgtgctagaggaatgccctcccagtgttggggtgaagaagcaagaatgagtgatgctgttggcaacaggaaataaataggaagcccttaggaagtaaataggaaagagttcttccccctccaactttgaaatgtgctcctggcaccgcctattggcagagcttaaggaaacattctgcaaaggagaacccctgtttgtagtgtgctagcctcagcattgcaaagtagagcatagacggttggatgtgaagctgacagacaacaggcaatagcatattaagtgacaaacatatcagcgccagccttgactgacacatgcccaagtcttccacccttccaccactgcaaaagcagcaacctcttaaatccaccttggcagaaagccacaaagagatgctaacatgaaatggacatggggataacttcatcaagctgcctgaaaccaggcttcagttgctggccaccctacacaagaccagaatcctaaaaaaagaccagaactccagcacacttgagagagtcctatattatttgaattccatgaagcagattgacaaagatcaggatatgaaactctgtggctgcagggtcccaggagaagtaggtgactgatttatgaaggatgcaaaataatttttgcagcaagtctgaactctgactatattagctcctgaagcatggtggggtattggtcagcaaaatatagagagaggcaatttatctgaagtcaacataacagagatacaacatttaatatatattccatctagacattggaatgggaaagtgagatactggccagcatccataacaaaagtgggctttctctcctggtaaaagaaaatcatttgtcctttcagaaaatgagtaacaaaatagctaaagccctcgcctattaataattactttaaagtaaatgaattaaacttcccaatcaaaaagggagagtatatgaatgggttaaaaaaaaaaaagagtcaatgatatgctgtctacaagagactcactttagatttgtgggcacacatagactgaaaatgaagggatggaaaaaaaaaatactccatgtaaaaggtaaccaaaagaaagcaagggtgcaaggatggctatacttatatcagacaaaatagacttaaagtcaaaactatctctagggacaaagaaagtcattataatgataaaagggtctctagggacaaagagagtcatttataatgataaaagggttaattcaatagaatgatataacatttataaatataaacctacccaacaccagagcacataattatataaaccaaatgtagacagatctgaagggagaaactggcaacaatacaataatagtaggagacttcaataccccactttcaaaaatggatggaatatacagacagaaaaaatcaataaacagctgacttgaacaatattatagaccaaacggacctaacagacatagaactttctattcaatagcagaggactacacattcttctcaagtacacctgaaacattctccagaataaatcacatgctaggtcacaaaacaagtcttcagaaatttaagaagattgaaatcatatcaaccatctcttaaaaaaaataggtggccgggcgcggtggctcacgcctgtaatcccagcactttgggaggccgagacgggcggatcacgaggtcaggagatcgagaccatcctggctaacacggtgaaaccccgtctctactaaaaatacaaaaattagccaggcatggtggcacgcacctgtagtcccagctacacaggaggctgaggcaggagaatggcgtgaacccgggaggtggagcttgcagtgagtcgagattgcaccactgcactccagccggggcgacagagcgaaactccgtctcaaaaaaaaaaaaaaaaaaataggtataggaggaacttaacacaataaagcccatactgaatctcaacaatgaaaagacctcgacactgaaggctctcaacactgaaaaagcccttggcagacagccacaaagagatgctaacatgaaatgaacatgaggataacttcatcaagctgcctgaaaccaggcttcagttgctggtcaccctacacaagaccagaatcctaaaaaaagaccagaactccagcacacttgagagagtcctatattattcataatcaatgaattgaaaaactaacataatcaatgaggataaactggaagttttttctctaagatctggtacaaggctaggaggcccactcttgccgtttctacccaatacagtattagaagtcctagtcagagcaattagacaagacaaagaaataaaaggcatccaaatttaaaaggaagaagtaaaattatctctgtttccagatgacatgatcatatatatagtaaaccataaagactcaacaaaaaaaccctgttagaactaagaaactaattcagtaaaatcgcaggataaaaatcaacatacaaaaatcagtggcatttctatgcacaaacaatctgaaaaggaaattaagacaacagttatatttacaatggcaacaaaaagcataaaatacttaagaataagcctaatcaaagaggagaaaggctcgtacagtgaaaattataaaacgttgctgaaggaaattaaagaaggtacaggtaaatgaaaagacctcatgttcatggacgggaagaattaatattgttaaaatgttcatactacccaaagtgatctagagattcaatgcaatccttatcaaaattccaatgccatttttcacagaaacaaacaaaaacactaaaattcatgtggaattacaaaagaccccaaaaagaacaaatccatcacactttctgttttcaaaatatattacaaatctacagtaaatgaaacagcatggtactcacataaaaacagacagatagactaacagaacagaatagagattctagaaacaattctacacattcagtcacctagtcttcaacaaggatgccaaaaacatacccttgggtaatgggtattttcttcaacctatagtgttgtcaccctcatagaggcagagcgtacaatggtggttgccacggtgggggaaggggaaaatggggagatatttgtcacagggtaccaagtttcagttatgcaaagtaagttctgaagataatatgcagtatagcgattacagttagtaatatatacgtgatatttgctagtacatggtaagtgttctcaccacaaaaaaaaaggaaaaaaatagcaactatgtgaggtaatggatattttaattagcttgattgtggtgatcaattcacaatgtatacatatatcaaaacaattgtacaatgtaaacatataaatttttatttgtcaattatacctgaacaaagctaaaaaaaaaaaatttgttatcatccctcacaaaaaaaccattagtccttttgtgtaagacacaaataataatgaaaagcgttttttaagaaaccctttaaaataataaattgtccttccctcctgttgtgtaagagctatggagcacttatgcattcagccttgtgctaagcaccataggaacaaagaagaaagcaaagagatgagaataaaaattgagggtagcaggaagagagggaagatgacaaaagcaactactttgtgtcaggctctgtcctaaacccaacgtgggcagtaagtacagatatagatacaaaaatggaagttccaagagaggtgttaaccttcccaagctcatgcagctcctgagaacaaggatgggaatgcagatttatctgaagtcttgaacaaagtacattttcttcacagagtcagggtaggatggaggacagtagaagaaatatttataaaataataatgtatcaatattttcttaatactcattattaatttaaatgtgtccaatgttggtttagataagaaacctctggggtcatcatacttgtttgttctgtttttatgggaggagtgggaagatccagtgattgccatctggttttttatctttgagaaaagataaaatatggcaaatataataaataggacaaccaagtggaattacagacctcaagaaggttaaggttaacttcacagggcagagcaacaaactttgaagtctgggtattttacaaaacttctttgttagcatgaatcttcaaaagaatagttttatcaacctgaatattacctgctttcctcacaaactgcatgggagcggggaacattttctccttgttgaaatttacttcaccaacagtgagtagaatttatagtttcaaggacaggtgctggaatctcagtgatcactaagagggggacggagatgcaagtttaaagcttacaatatagaaaaagacaaaagagagtttttaataaacaaaatatgagcatgtcatgttttacattgatggtgcccctctctgttgccactcagtggcactttacttagacttgaatttgtagaagatattttagctcctttttttcagatttatttttccagtatgcattactccttaatatacatgtaagaacttttaattttcattagtaaaggttgcaaattatgcagcattctataagtgtcactgctaaatttgaatggtttcttccagctccattacaatactgtatattttaaaggcaagaaaacagaagtgaataagtgttaaattttttttcctttttgagacagagtttctctcttgttgcccaggctggagtgcaatggtgcaatctcacctgactgcaacctctgcctcccaggttcaagttattcttctgcctcagcctcctgagtagctgggattgcaggcttgcaccaccagacctggctaatttttgtatttttagtagagacagggtttcaccaggttggccaggctggtctcgaactcctgacctcaggtgatccacccacctcagccacccaaagtgctgagattacaggcgtgagccaccacacccagctgatgtctccaaatattcagaatccttctatatatactttccatttgccaaacctcttccatcagggcccattcacattcgtcttttcatccttcacattcccttttctacattcaagtctttctgaaaacttctttgcctcttaatcagataactctcactgccgatttctcatttatatgcaactttgtacaagagattggttcaatcaatttatgtcaagtctttgttctcctgaaagacacccaatttggataaggatttgtaaattggggcttcaaagccaccatcatctgcaagactcagtccagccaataaattataacttaataaatcattgcatgcattcaaaaaagaaaataatagagcttaatctttgaaaatccatatctgtccttagtcttctttcagtctcatggacagcacaagtcttggccactctagctacccacggttttttcagagtgtccactagatttaagcagtcaacaataagatgtttccagaaaggtcacacaaactatacatatcaaaatatatgctgtgttgtaccacccaggtgcccataaggactgaagctttcatttccccagcagccaggagtgctggctgctgacaattcacagctgagtctctctctccgggaatttccctctactgaaagaagcggccataaccaagatctccaccttctccccaggaagagccctatagccaatatctggtcaaagagaaggttcaatgtcccccagctccagctgaggcctctgctgcaactgcattctatttttttttttttaagacagagtcttgctttgttgccaggctggagtgcagtggcgcaatctcggctcactgcaacctccgactccctggttcaagctattctcctgcctcagcctcccaagtagctgggattacaggcatgcaccaccacgcccagctaatttttgtatttttagtagagacagggtttcactatgttggccaggatggtcttgatctggccaactgcattctaatttaacttctccctctgcccaatcctgcttcttcatttccttacagatgtcgtatgaacctcctacatgaaaatctctcccaatctgctttcagagaacctaacccaagacacaactcctgcaagaatgtttcagtcattcagaagatcaaaagaaggttttaggccaggtgtggtgacttacacctgtaatcctagcactttattagagagagatgggaggattgcttaaggccggaagtttgagacgggcctgggcaatctggcaagactccatctttacaaaaaaattaaaaattagccaggcatagtggtatacatctgtaatcccaggtacttgggagactaagatgggaggatttctcgagtgcaggagtccacggctgcagtaagctacaattgtgccagtccagcttgggcaatgaaaggagaccctctctctaaggaaaggaagaagaaggagaaggagaaggaagaaggaagaagaagaaggagcaagaggggaagggcagggggagggggagaaggagagaagaaggagaagaaggacaggaaggagaggaagaaggagagaaggagaagaaggagagaagaaggagagaagaaggagagaagaaggagagcagaaggagagcagaaggagaagaagaaggagagaaggagagaaggagaagaagaagagagagaagaagaagaagagagagaagaaggagagaagaagaaggagagaagaaggagagaagaaggagaggaggaggagcaggatgaggaggagcaggaggaggaggagcaggaggaggaggagcaggagaaggaggagcaggagaaggaggagggggagaagaagaaggagaagaagaaggaggagaaggaggagaagaagaagaagaagcttcgaacttttcacagaaatgtgctcaaggcccaaagacaatggaaaagaacaagatgatcaagaatggcaaaaatggagcagaaagaggaaggaatagccagggaactgaggagaggtaaaagaagtcctctgaaacagggctgtggtatacattcctgagatgcctcacttttctgggtgtttggccaaactcatttggctgaactacatggtagaatcttgttagttggcaatggattcaccaatgctgagcctacggaatatggcaggggaactcacaaccttcatgtacagctgccatcagttccacaggataatcaggggaattcagagcacccttcttaaagttgtaagtttcaccagaaacaatatggcattatattctgcaagtatgacatttttagtgcaatccagggtatgatgaggattaatataatgctgttgttgacaacctcacaagccaggaacactggcaactatataaaaggcaggtacctctgtattttcctaccatggtgatgaaacagagaagcaccaatcctgcaaggttgaaccagtatcaatctattcaaatgttatgcatattgtcccaagggaaagtcctgggaatttctcccttggtgccgtgtggtatgtgagcaagcattttaaaacatttaggtcttttacatataaataagatagttgaatggatttattgatgttgtgtctttgggatctcatactcaaaagcatagcaaaaatacctagacacaatcttatcatttcagttttaatcttttaaagtgaacattctttaccttacaattgaggtccaatggccaatctgtaaagttctgtagaaaactatagcaactatcaaaccacaagattttgcttagtgtcagcactattgacttattctttgaaggaaaggaaaaaatttacattttttctcaaacttcccatgttgtgagatatgtcccatataaggacttatttcctgattggaaaatgaacacgttattggcagaaataggttgtgtatttatgggaagaagatgaagaagaagaatctaatttttaggaacaaaccagtgaagtccaaagcaagatcaaccagaaagttgaatgctctctcattggaaattttcagtaattgtttcaatgtggaattcactgtagcagtgtagaagttacttgaaaactctggtattttaggggcgagatcaatggcagagtgggtcttcagctgttcaggtaattttaagacattgttaagaagtgggtcatttgtctctgtgcctaaaaaaagaacacgaattaagaacaagatgttaaacgggagccaagatggccaaataggaacagctccggtctacagctcccagcatgagcaatgcagaagatggctgatttctgcatttccatctgaggtaccgggttcatctcactagggagtgccagacggtgggtgcaggacagtggatgcagcgcaccatgcgcaagccaaagcatggtgaggcattgcctcactcaggaagtgcaaggggtcagggagttccctttcctagtcagagaaaggggtgacagacggcacctggaaaatcgggtcactcccacccgaatactgcgcttttccaatgggcttaaaaaatggcacaccaggagattatatcccacacctggctcagagggtcctacgcccacggagtctcgctgattgctagcacagcagtctgagatcaaactgtaaggcggcagtgaggctgggggaggggtgcccgccattgcccaggcttgcttaggtaaacaaagcagccgggaagctcgaactgggtggagcccaccacagctcaaggaggcctgcctgcctctataggctccacctctgggggcagggcacagatgaaaagacagcagtaacctcttcagacttaaatgtccctgtctgacagctttgaagagagcagcggttctcccagcacacagctggagatctgagaataggcagactgcctcctcaagtgggtccctgacccctgacccccgagcagcctaactgggaggcaccccccagtaggggcagactgacacctcacaccaccgggtactcctctgagacaaaacttccagaggaatgatcagacagcagcattcgaggttcacgaaaatccactgttctgcagccaccgctgctggaacccaggcaaacagggtctggagtggacctctagcaaactccaacagacctgcagctgagggtcctgtctgttagaaggaaaactaacaaacagaaaggacatccaccaaaaacccatctgtacatcaccatcatcaaagaccaaaagtagataaaaccacaaagatggggaaaaaacagagcagaaaaactggaaactctaaaaagcagagcgcctctcctcctccaaaggaacacagttcctcaccagcaacagaacaaagctggacggagaatgactttgacgagttgagagaagaaggcttcagacgatcaaactactccgagctacaggaggaaattcaaaccaaaggcaaacaagttgaaaactttgaaaaaaatttagacgaatgtataactagaataaccaatacagagaagtgcctaaaggagctgatggagatgaaaggcaaggctcgagaactatgtgaagaatgtagaagcctcaggagccgatgcgatcaactggaagaaagggtatcagtgataaaagatgaaattaatgaaatgaagcgagaagggaagtttagagaaaaaagaataaaaagaaacgaacaaagcctccaagaaatatgggactatgtgaaaagaccaaatctacgtctgactggtgtacctgaaagtgatggggagaatggaaccaagttggaaaacactctgcaggatattatccaggagaacttccccaatctagcaaggcaggccaacattcagaatcaggaaatacagagaatgccacaaagatactcctcgagaagagcaactccaagacacataattgtcagattcaccaaagttgaaatgaaggaaaaaatgttaagggcagccagagagaaaggtcgggttacccacaaagtgaagcccatcagactaacagcggatctctcggcagaaactctacaagccagaagagagtgggggccaatattcaacatgcttaaagaaaagaattttgaatccagaatttcatatccagccaaactaagcttcataagtgaaggagaaataaaatactttacagacaagcaaatgctgagagattttgtcaccaccaggcctgccctaaaagagctcctgaaggaagcactaaacatggaaaggaacaactggtaccagccactgcaaaatcatgccaaattgtaaagaccatcgaggctaggaagaaactgcatcaactaacgagcaaaataaccagctaacatcataatgacaggatcaaattcacacataacaatattaactttaaatgtaaatggactaaatgctccaattaaaagacacagactggcaaattgaataaagagtcaagacccatcagtgtgctgtattcaggaaacccatctcacatgcagagacacacataggcccaaaataaaaggatggaggaagatctaccaagcaaatggaaaacaaaaaaaggcaggggttgcaatcctagtctctgataaaacagactttaaaccaacaaagatcaaaagaaacaaagaaggccattacataatggtaaagggattaattcaacaagaagacctaactaactatcctaaatatatatgtacccaatacagcagcacccagattcataaagcaagtcctgagtggcctacaaagagacttagactcccacacaataataatgggagactttaacaccccactgtcaacattagatcaacgagacagaaagttaacaaggatacccaggaattgaactcagctctgcaccaagcagacctaatagacatctacagaactctccaccccaaatcaacggaatatacattttttttcagcaccacaccacacctattccaaaattgaccacatacttggaagtaaagctctcctcagcaaatgtaaaagatcagaaattataacaaactgtctctcagaccacagtgcaatcaaactagaactcaggattaagaaactcactcaaaaccgctcaactacatggaaactgaacaacctgctcctgaatgactactgggtacataacgaaatgaaggcagaaataaagatgttctttgaaaccaacgagaacaaagacacaacataccaaaatctctgggacacattcaaagtagtgtgtagagggaaatttatagcactaaatgcccacaagagaaagcaggaaagatccaaaattgacaccctaacatcacaattaaaggaactagaaaagcaagagcaaacacattcaaaagctagcagaaggcaagaaataactaaaatcagagcagaactgaaggaaatagagacaaaaaaacccttcaaaaaattaatgaatccaggatctggttttttgaaaggatcaacaaaattgatagactgctagcaagactaataaagaagaaaagagagaagaatcaaatagatgcaataaaaaatgataaaggggatatcaccactgatcccacagaaatacgaactaccatcagagaatactacaaacacctctacgcaaataaactagaaaatctagaagaaatggataaattccttgacacatacaccctcccaagactaaaccaggaagaggttgaatctctgaatagaccaataacaggctctgaaattgtggcaataatcaatagcttaccaatgaaaaagagtccaggaccagatggattcacagccgaattctaccagaggtacaaggaggaactggtaccattccttctgaaactattccaatcaatagaaaaagagggaatcctccctaactcattttatgaggccagcatcatcctgataccaaagccgggcagagacacaaccaaaaaagagaattttagaccaatatccttgatgaacattgatgcaaaaatcctcaataaaatactggcaaacagaatccagcagcacatcaaaaagcttatccaccatgatcaagtgggcttcatccctgggatgcaaggctggttcaatatacgcaaatcaataaatgtaatccagcatataaacagaaccaacgacaaaaaccacatgattatctcaaaagatgcagaaaaggcctttgacaaaattcaacaacgcttcatgctaaaaactctcaataaattaggtattgatgggacatatctcaaaataataagagctatctgtgacaaacccacagccaatatcatactgaatgggcaaaaactggaagcattccctttgaaaactggcacaagacagggatgccctctctcaccactcctattcaacatagtgttggaagttctggccagggcaattaggcagaagaaggaaataaagggtattcaattaggaaaagaagaagtcaaattgtccctgtttgcagatgacatgattgtatatctagaaaaccccattgtctcagcccaaaatctccttaagctgataagcaacttcagcaaagtctcaggatacaaaatcaatgtacaaaaatcacaagcattcttataaaccaattaacagacaaacagagagccaaatcatgagtgaactcccattcacaattgcttcaaagagaatacaatacctaggaatccaacttacaagggatgtgaaggacctcttcaaggagaactacaaaccactgctcaaggaaataaaagaggatacaaataaatggaagaacattccatgctcatgggtaggaagaatcaatatcatgaaaatggccatactgtccgaggtaatttatagattcaatgccatccccatcaaactaccaatgactttcatcacagaattggaaaaaactactttaaagttcatatggaaccaataaagagcccgcatcgccaagtcaatcctaagccaaaagaacaaagctggaggcatcatgctacctgacttcaaactatactacaaggctacagtaaccaaaacagcatggtactggtatcaaaacagagatatagatcaatggaacagaacagagccctcagaaataacgctgcgtatctacaactatctgatctttgacaaacctgagaaaaacaagcaatggggaaaggattccctatctaataaatggtgctgggaaaactggctagccatatgtagaaagctgaaactggatcccttccttacaccttatacaaaaattaattcaagacggattaaagacttaaacgttagatctaaaaccataaaaaccctagaagaaaacctaggaattaccattcaggacataggcatgggcaaggacttcatgactaaaacaccaaaagcaatggcaacaaaagacaaaattgacaaatgggatctaattaaactaaagagcttctgcacagcaaaagaaactaccatcagagtgaacaggcaacctacaaaatgggagaaaattttcacaacctacttatctgacaaagggctaatatccagaatctacaatgaacacaaacaaatttacaaggaaaaaacgaacaaccccatcaaaaagtgggtgaaggacatgaacagacacttctcaaaagaagacatttatgcagccaaaaaacacatgaaaacatgctcaccatcactggccatcagagaaaagcaaatcaaaaccacaataagataccatctcacaccagttagaatggcaatcattaaaaagtcaggaaacaacaggtgctggagaggatgtggacaaataggaacacttttacactgttggtgggactgtaaactagttcaaccattgtggaagtcagtgtggcgattcctcagggatctagaactagaaataccatttgacccggccatcccattactgggtatatacccaaaggacttaaatcatgctgctataaagacacatgcacatgtatgtttattgcggcactattcacaatagcaaagacttggaaccaacccaaatgtccaacaatgatagactggtttaagaaaatgtggcacatatacaccatggaatactatgcagccataaaaaatgatgagttcatgtcctttgtagggacatggatgaaattggaaatcatcattctcagtaaactatcgcaagaacaaaaaaccaaacaccgcatattctcactcataggtgggaattgaacaatgagaacacatggacacaggaaggggaacatcacactctggggactgttgtggggtggggggaggggggagggatagctttaggagatatacctaatgctaaatgacgagttaatgggttcagcacaccagcatggcacatgtatacatatgtaattaacctgcacattgtgcacatgtaccctaaaacttaaagtataataataataaaataaaaaaaaacaagatgttgttaaatatgtgaggaacacatttccttacagtgggaggcagatacctcagggctggacaccatgtttgaagttggctcttggtggggccctttccagagaggtttgagcaaatatccactgactaaacttgatatgaaatccattgccaagcttattcaacgacatgccattctggatcaattagagggcttcttgtgaagaagcattggcacacttcctgagtgccttgcaataatctagctcaagattacctaacacaattcttcttctcccatgattggtccctgaagaggtagcagagctttaaccattaatatttcacagtgaaggctgtgaaggcattgttttgtacagtgtggcccaaataccatcaagaggcaaggtatatacaagtccttctgcagacagtcattgcatacatatttacacgtgggcatggttctgcccttcctaacaacatgcacagaatcattgaaatatatttatctagaccacatttcacacatataaaaatctatctaaatagttacaataggcctccaaatggaagtataagctactttctttacctgaacaccataaaatgaaatctcttttacaatattgtagagtaattctgaaagactctaaagcatactaatcgaggctaattattactaaaatgctgtctttctttctgtatgtgtgtcgtgccagagattacataagcaaagtaagacagcaaatatttggtgcaaaagagcagctacttgtgaaggccaacgctagtctgcatgcaagagatgcctgtcactctctgaaggtctaaatttgagtcctgatattggacaaggggaatatctgtgagcactaccagttgaacacaggagcataggtacatgagatcaagagaaggtcaccatctagcctgggtgaataactgaagttttggtaccttataatcaacactgtagatgttaaaagaaggatcattagaaattttagctactccagaggcaagggaattgttattctttttataattgtctacattataaaatgcacttaaggttaagtgcataatgagagtcaaagctcttttgagatatgaaaaaacacaatttctcaagggtaaaatgttgactacctgtacaaagtatacagaaagcaaagaagtatttgctacggcatattgagaacatagtatatatcttaagtttaactttcttttctctgatctatcaatcttttctcctctatttagttcaaatttattgttttcattagcttcaatagatcttgatatgtacatatgtgtatatatacaatatatttttaaacaaactaatgaaatttttgatttatatttttgttaaaatgtaaaactaggatttatatttagtttaaatatgagactaaatattagactaaattagactcaatataaacgttacaccacccactgaatggatttgtagtttgacggttccttttaagcaccttcttaaaaggaaaagatgagagttccatcttttttcttctttaaaatcattctgccccagtcttcacttatcatcacatgcactttactccaccaaacatcatttctcaaaatcaatctatttgaataatcattaagcccgtttagagctttcccagtcttaaaatttgtcatcacacacaacgtgtgtgatgtcatgtgtgactacacatcccaaggcctttctcactttttctggttaatacagaatgtcccataaagaaagaataaaaggtcaggtgcagtgggtcatgcctgtaactccagcactttgggagtccaaggcgggtggatcacttgagaccaggagttcgagaccagcctggccaacatggtaaaaccccatctctactgaaaatacaaaaattggatgagcatggtgatgtgcgcctgtagtcccagctactcaggtggctgaggcataagcatcacttgaaccccggaggcagaggctgcagtgagctgagatcgcaccaccgcactccagcctgggcaacagggcgagactctgtctcaaaaaaaaacagaaacaaaaaacaataaaagttgtatatttctttaaaatgaaagatcagtaacttcaatggctattatattaaccacttagtaaaggtacaacaaaaactacacatccttatgttaactaactgaaattataataaattagttaagctacttttgtcacttaatgtttgcaagggtactcaagaaatcaaaatggcttcccattgcttgacatttgctttccaaatacttcacatttcaaccctatatccctacaaagagaaataattcaacatactttccttacctaaaaatactacaggaggctaaaaggcatttagaattttttagaccttgaagaataatgttacacttccaacatgtatttaacttataaatcagtttctattctgttgcatagcttcagtctaagtacatcatagttatattaactccgtattgcttcatcttgtcaagtcagacaaagattctgttgcatcaaggctcttattcaagatgtcttcttcgtttgaattaggtagaagttctccaaaactacatggtattgtggtcaatctttgttccactggaggaaacttaattagtggtgaaagagacttttctttcaccaagggacatgtgtaaatgtggttttgcatattcaatgtgcacatcatgagtgtccaaatagttaagcatatcatctgtttgcacattttggggagtagggctcaattctggtttgtgtctttcaagtgtttcaagattagacaggtaaaattcttcccttttcttggaaaaagatttcttcagagcctcatatctactgcaaacagcctatagattgaagtctgattctggagtagtttgtccatctaccataatatctcctagaaaaatgccactgtccacaggactatttggctctagtttaaactggactctaagctactggaacttttaacacttaggggaccaccttcctccggaaaagtttcatgccaaatgtaaatatgctaaaatcaatatccttacaactcttagaactaattccgcttgatatctgaaaagagttccataatgtagtgttattcatggaaggtttgttacaggaatcctgtgaatggtccaatattttcatatactcctctttactgctacccagctcatctatcccattgctgatggcaggggagaatgtcttcttggctagtttctgaaagcttggttggtaaagctgtacattccaaatcttgcttgcaaattattattatttttttttttttgagacacagtctggctctgtcacccaggctggagtgcagtggcatgatcttggcttacggcaagctccgcctcctgggttcatgccattctcctgcctcaacaggcgcccaccaccatgccctgctaattttttgtatttttagtagagacagggtttgaccgtgttagccaggatggtctctatctcctgacctcgtgatccgcccgcctcggcctcccagagtgctgggattacaggcgtgagccaccttgctgggcgcaaattattttcttactcaacaaatcagactgattttgtattggtggttcacccatatgattgatcaccatgtatttctgaggcacacacttgcagtctcatttcagtcaaatgagactggccgaaatctcatacagtggtttaagagaaaaccgactatgctaaatcctctttgattacacaaatcaggtaatgatcccagcaatacttctctgtgctcagtatccgtttgaattggttctgtagttctgttttcttccatttcaatagtttttctccatgagctcctaatttccattgtcaagttttatgggtatgggaaatctggttccttgttcagaagaggttagaacctagagagtcaattagttcccctaaatttacttattttctctcacagagctgtggtgaaccaaataaaactgctccaacaaccccttctagcagatgatcttgcttttttttggaactgaccacttttttttagctggcagagaccctccaaatgcactactctctgttctttgcgacatctgataatggagaatcttccacttcaaaatctggtattttcttagaaattgttttatttttctctttgggagttctcatcttcctgtccttttcaagtggtgtagcattgtttctatctgatgatgaagctgactgcaacaagaaagaggcagggctgttggctagatcatgtacagctcccaaggtatcattgtctcctctgcaaccattttcttggtgatgttgctcaggtgtacctaaggccaaaatctgatacagtggtttctaacagaaaccagacaacgataaattctctttgattaagcaacacaggtaatgattctggcaatatcagtgaagcaggatactgaaaaagaatactctttgcgtgcacttctgagggaagaccaaatgaaaggggagacataggtggtaaaagatccacaactgggccgggcgcggtggctcacgcctgtaatcccagcactttgggaggccgaggcgggcggatcacgaggtcaggagatcgagaccatcctggctaacacggtgaaaccccgtctctactaaaaatacaaaaaattagccgggcgtggtagcgggcgcctgtagtcccagctactcgggaggctgaggcaggagaatggcgtgaacccgggaggcggagcttgcagtgagccgagatcgcgccactgcactccagcctgggcgacagagcgagactccgtctcaaaaaaaaaaaaagatccacaactggagttcaacttttaattagagtgaaggaagacagaccaagaaattctttccacttcctatgccattccccttgcttttcaacaatagaatgtcttatagttgtgagatctttttattctatagcttatatgcttcagatctgattatctttccctctaaaatttggtatctttttccaggtagtgaaggtctattgtcaatcgtgcttggtcagcctgactttcctatttcattactttcaaggcttcattatataacagaataacttaagagtttccattttccagactcataaacatttcctatgtgcaactgacacatctgtctctcaattttgtcaagagtcaactaatagcattagttccatctaaagcatatcggttagactaaggactgaactaacaacttctctttttccagaaacatgagtgtttcattcactgatgttcacaaaggcccaaccttttgagttttttcttctatactactttggtcacccatagggttccatttttttaaatttggttttgcagttctatacatctagatctcaaatttcagacatacttaactaataattgtacattttcctgagattttggggtaatacaatctgctctttgcaaaatttgtaaacatttgttacgtgctaaatggcatctggcattgcgcttgtgcaaactttgtgatttcacattaaatgtctgcaaaacataaagaatttttagaattggttttcatatattttattacaacaaatctcgcaagatgttacatcagatgagtaaacagaaccgctaggagaaataaatagtgaacaacaatttgaggaaagcttccacattcagcagaaatccttgttaaccattcacagcaatgtttcctgaatatcgtatcactttcttggtcaaatggtggccaacaaaatttaaaaacttctttggtgagagactggtccagcatttgaaacaaaaaataagaaactatatgaaagccatcacggttcagcttatcaaacatgttcactccaaggtgcttatttgacaccctttgcaggccatggtcaaacccgggcctggctcaaagctgagcacctgccgatacattcagagatgcttgttctggaaagaggtgatccaggccaaggtcatcctcatgataggcacggtgactgcaaagaaaaaaagcacaagccctagcgactcttgggtcctcaggatccctccctatgggcagcctgaggtctcagaggtcccttctttgccactgcctgcatctctctcgctggagccatttcacctcaaagggctgtacagtctccagaaaatggagcctgtcatgggaatgtggccgcagctgcctactcgaagcctacaatatgttcttaactaaacagtaattaaaggacaatgtaatttaagcttaaaagttctaatgtttaaaacataagcaccttgtcaagcacatttttggacaatgtatataatccgttggtataaactaccttcatttgggtaatctgaagaacaaattaatttatatccatgagaataaatagatttttttttaaaatgaagataatatggtaacgatagacttcactttctgcatctctccaaattttatttaaaagtgtcaagataaataaagatttacaagtgccataatattaaattgttctaaagctcctaaatgatggattttagaaaacataagttaattttaaaggataatgaaatcacagcttataacaacaattttacagggaaacaagaacattataaaactaggcccagctggtttaactgatgaataaactctacataaatagaatactgtctgaagtttataagaaccaaatttatatgcactacatgtttaaattgtggctcaatttaattgaagacctatgtttttatttatatatttaaatattataattaataaaaacatctgatttacaaattaagtgtaaggaatgtaggtatttaactgttttgtaaaataataaatagattaaaagtcttaaatagactaaaaatctcatgtttgtatttttatttcccactgaggcaaattcagagagaacaaatatagacttcttttaacccaaactttatcaaaaaataaaaatgtttcccctgcttgggagtattaatgggaactggatataactataaaatctctccctcaactaaataatattaaaagctttgtggaaggattttataatcctttttatgattactcattaagcctaaagttaatttgcatatcttttattccccatattgtacgtggaaggaacattaaggtcatttaactaaaattagattttgccttttctcatccaaaaacatttttaagtgaaagtatttatatcagaaaacaagaacaccattaaaattatttttaagatctttgtgattttgacagagttctttatacattttttatttatatattttatgttattcctgagtataatattccttttgaccaaaaggttttaaacaattcagtacttcaatttcttcatttgcaaataatcttttcaagtacaaacctattataagattcagtcctccaaagatgtatttctttaattttcttaatgtatttgcacaccttacaaggtttaattgatggctcaactcctcaagcacttgccactttctcccaggctggagtttttttattgaagtgctaacaaatttaaggcacttggaatttgggtttgatttaaaattgttttccctgaaagttaataaaacctttacaccctttccaataacctccatagacaggctcacctatctaatgtagagataccttttaaaggaaacctctttctctcctcagtcatatcacatccacaccaacattcaagggtcacacggcttctgcaactgtcagctatttaggcagcatcagaaagcatcagaaaaatggacatgttggtaggattagagaaacctcttggattctcactccctgtttctcaatttgcatgggctcacacataggaaaaagtctcacaattgtgcccaccctgccccaccccctacccccctacacctcccgggcccaggaactgaatcagcacaagaagacatcttccactccctgtgatttcatctctgacctgacgaccaatcagcactcctgactcactggtttccccccacccaccaagttgtccttaaaaattctgatccccaaatgctggggagactgatttgagtaataaaaaaaatctggtctcccacaaaaaaaaaaaaaaaagtctcacaatcaaaaaacagaagaaactatagatttttggtccatctgtaaattgcatagcaaccccttaacttccaaagaaaaggatgaaaaatgaaattctattaagaaaagaaaacacttacccagctgctttgagcatcctgtgaattaaaacttgaactcgccgggcacagtggctcatgcctgtaatcccagcactttgagaggccaaggcaggtggatcacctgaggtcaggagttcgaaaccagcctgaccaacatgacgaaccttgtctctactaaaaatacaaaaattagccagacgtggtggcgggcacctctaattccagctatttggggggctgaggcaggagaatcacttgaaccggggaggtggagcttgcagtgagccaagatcgtggcattgcactccatagcccaggtgacaagagcaaaactccatctcaaaaaaaaaaaaaaaaaaaagaaagaaagaaaacttgacctccagggagcagcagttctccaacactgaagacaagcaatactccaagttaaaggtttttgtctctgggatcttttgtacaccaatcctgttcccaaacagtcaaggcacaacctcactcatttgcccagaagcagattaaatctacactaattaacaatgagaggaggtggagcaatatgggtgaatagaaccctccaacaattgttccccccacaacccagcccactcacaggaacaccaaattgaacaactaaccatgcaagaaactactttcataagaaccaaaaatcaagtgagtgatcacagtacctggttttaacatcatatcaaggaaagaggcactgaagagggtaggaaaaacagccttgaattactgacaccactcctctcccatcccttggtagcagctgcatggtgcagagagtgtgcttgggggaaagggggtgcagtgattgtgggactttgcattggaactcagtgcagcagaaagcgacatgaagtgggattcagatggcacccatggagggagcatttggaccacccctagccagaggcaaatcacccatcccaacagtcagaacctgagttccacctagccccaccaccacaggctaaagcactctggtgtcctaaataagcttgaaaggcagtctagaccacaaggactgcaattcctggctaggtcctggtgctgtgctgggctcagagccagtggacttgggaggcatgcgacctagggagacaccagctgaggtagccaagggagtgctcacatcactcttccaaccccaggcagtgcagctctgagagagacttctttctgcatgaggcaagaagaggggagagtaaaggggactttgtcttgtaacttggatacaagctcaaccacattagaacagagcaccaagcaaagttcccaggcccccattctaggacctagctcctggacgacatttctaaacacactttgggccagaagagaatccactgccttaaagggaaagtcctgacaagtctttgtcagtcctgacaagattaattacctgccaaataaagagcccttgggccttgaataaacatcacgggtacccaggaagtactcgccgcaggccttgcatgagacccagggctgtactggcttcaggtatgacccagcatattccagccatggtggccatggggagggactccttctgcttgagggaaaagagagggaagagtaaaggggactttgtctttcagcttgggcaccagctcagccacagtggggtggagtaccaagcgggctcctggggcccctgattccaggccttggattctgggcagcatttctagtcccaccttgggccagagggaagctcactgccctgaagggagagatccaggcctggcagcattcaccacaagctgactgaagagcacttgcgctttgcgtgaacatcagcagtagccaggcactacttgccatggccctgggacagtgttggccatgggaagaccctccttctgcgtgaggaaaggagggaagagtgggaaggagtttgtcttgtggcttgggtgccagctcagctgcagtagagcacagcaccaagaagattcccaactccatgccctggttcccaagtggcatttctgaacctgccctggggcagaggggagctcactgccctgaaggaaaggacacaagcctggctggatttgccatttgctgacagaaaagcccttgggccttaagtaaacgtcagcagtagcaaggccatgggcaccacaggccttgagtgagacccagtgctgtgccggcttcacgtctgacccagcatagtcccagtagtggtaatcacaggagtgtctgtgtcaccccttccccagctccaggcagttcaccacagagagagagactctgtttcgttgggggatagtaagggaagagaacaagaggctctgcctggtattccaaggaattcttctagctcttatccaagtgaaagttagtatgaaaaggctacataattatatgtgatttggaaaaggcaaaggctatagagcagtaaaaagaccaggggtttccaggaacttggggggaggaaggagggtgagatgaaggaaatttaggggatggtaaaaccatattgtatgacactgtcatggtgaatacatgacattatgcattatgaaaacccatagaactttatagcccaaagtatgcaaagtagttatgcacattttaaaaactgtttaggaggtcagggagtcccaggatagaaggcagaccatgacaaaagactcttactgggttacaaatgtgagaagtaatcacactgaaaggagttgggagggtaagagctgacctgactaacttgggaaatgaacagggtctctaagactaaaggcaaaaaggactgcacataagcatcatatactagttagtaaagttactttccctggggatgtgagttaacatacacatgtatatttctttgtcctgtcagcttagagagtctagaagcaatgacacccctgtagcaataggaatatctagtgtccagaacttggtttctaatagcattctctagtaaaagaaacaggcttccttggagaaatgactgactctagcacttgggcaagaaatatacaagatgagcctgaagaagaattttaatctaagggaacatgtggcaccatgacaaagctgtgtgttaggcactgaggaaggagctgaggtatgaatgaaaccctttccctgaaggcaatgggaattcattcatgaagaagggagatagacctgtttaaagagagtagccatgtttctgttccgcaaactcactgaggtcatttccacctcatggtcttggttcttgagattttcactccctgaaagtcactttttctggattttcctgtggacaggaactgtgagatcttctaccaagaaccaacaccaactcgtcaaccatgaggaagagaacctgcagctctagttgagccttcagaggactaacatctaactgcaacctcataagagacccacagccgaaagtaccctgccaagccactcctgaattccagactcacagaaactgttagagataatggatttatattatcattttaagccactaagatattggggttgattataatacagcaatagataattaaatgtttgtcatgccccaggtatcagcagcctcagcatggtaagactaaaggaggaggtgctccctggctgttcactcccataactttgatagaggaattgggctatgggggagtaatctttagcatctgcacacaagacagaggtggactcaacatcaatacccttttgcttaggaacttatgcttgggaactcatctttgccttcataatctaacaaacaaaacaatagtatctttggtcatatattgagcctttaatgtgatgaatcctcacaataaggtagatatttttatctttcttttccagaatggtggctcatccaagaaaaaaaattgacacaatgttatacaatggttaaatgacagctactcttgactcttcagaggccagaccaggacaataagcagagaagggaattatgtctagaggggaaaggaatccaatagagagcaagaagttgaaaatacaaggggatgagaagtgattaatggaacaaagacccagaggaagcaacagataatggtgtcaagaggctcaggggaaatattgccttggacaaagagaggatagtctcttttaaagaagatgagtgttttgcagaaagtatatcataatggttaagaccaaaaactctgatgtcagacagacttggatctgaatgctggctctgtcacttattaatgaaggggcagttgtggtcattcacctgtttagatgcccaaaatctgcactgacttatcgtcaggtaattccttgtcatatgagacaaagtgaaagagcacatcttctctgaagacaggaaggccacaattttgcttctagggtaaaggcatgtgacccccagtttattctgctcaagatcctaactccaggattaagtcacccaccatggcccatgtgtcctcaccaatggttatggagttatgatcctgtggttggcagcctcaccaagaggcagttccccacagggtcatgaagtacagacaaaagcagtttatttctactacatcctctttcaagagaaactaatagaagaatcagatgaaaatttaaatttttaacataacacagactttccaggaaatagaaataaagcataaaaaagcacataacttaaagcattttggtcagtttaaaattgtattaaaagaaataaaggatggtccagaagtaacaaattggtggtctaaaagatgaaatggaagagatatttcacaatggaaaacaaaatacaatgaaatgaaaattgtttatttgcggcattattcacaatagcaaagacttggaaccaacccaaatgtccaacaatgatagactggattaagaaaatgtggcacatatacaccatggaatactatgcagccataaaaaatgatgagtttatgtcctttgtagggacacggatgaaattggaaatcatcattctcagtaaactatcgcaagaacaaaaaaccaaacaccacatattctcactcataggtgggacaatgagatcacatggacacaggaaggggaacactctgaggactgtggtggggtggggggaggggggagggatagcattgggagctatacctaatgctagatgacgagttggtgggtgcagcgcaccagcatggcacatgtatacatatgtaactaacctgcacaatgtgcacatgtaccctaaaacttaaagtataatttaaaaaaaaaattgaaaaaaaaaaaaagaaaattgttagctggggtaatgcttcctgcacattcctcatgctttcatgaaaaaacctgctacactctcaaagagggaaaagtattttaaagaacactttcatgccacctctataaataataagctcaagaattagaaagaaaaaagtagaagttacaattagaaacataatagaagcaaatttctcagaactgaaggaaaacatgagtttttagattgagaggattcaccaagtcccagggatatccatgagaaaaagcacattatctagaaacaaatttttttttaaattatatttccaggataaaaaggcagtgtcagaagcttctaggcaaaagatacaagataccaacaaaggaaagagaatcaaactaacatcagacttttcatctgcaattctggaagaaacacagtacagtggccaaccacaatggctcatgcctgtaattccaacactttaggaggtcaaggcaggaggattgcttgaggccaggagttcaagaccagccttggcaacatagaattgtatgcaccataaaataaagcaacaaaataagtatgtaatgtaaaaactactaaaaatataagaacttgtttaaatgcttaatcacatggggattttaatatagttctctgagtattttacccttcaagtaaatagaaaataagtaagaatatttacattgattaagggagtgaaaagcttaatttaatagaggacgttgtcccatatcatatgaaagaaccaagttctttggcaaaaagaaatcattactaaattcccaaaaccaaagattatcagtctcttgtttctgaccatagtccattaaggccagaagtcaatcacaaacaaaagtgaccaaaggaaataaaccacctggaaatttattcagaaaaataacattaagcccctcttctcgagctttattagttcttctgtggccaaacaggcatgtaagtatatggttatatgactcctttccacaggggctgatagagagtgaaaatgaaccctaagagaaacaagactgaggtggatcctgggtgacagctggatgcgaagtttgctctgtgtgttgggcattcacagaagtgactgtactctttccaggatgcccatgtcagaagtagcattcccatgacccttcacctaccctgggaagggggcatttcaggccctgttataagcatcctttccccaactctcctgcctgctagtcactcttcctctctttacctcagtgctcccatctgtaaaataaggaagtctgacctattttatttcaaagagcctgatgttatacattgtctaaaaatgggtttactacaatgtgtttaacagatttaagattttttaatgtgttaaaaatatgtgtataagaaaagaatattaaaatattaatattattaaaagaatactaaaatattcttttctgagccccctaagtttaagcccctggctctggaaacaaggagttttcagttggttctgatgctatgtgacgagtgttaggatagaatgggaggggatattgagcagagatcccaacactcccataggaaggtagacttcctggtttgtggatcctctctgtatatacttccatgacagttttaccttttcttccattcttctgcctcccctcagtgtatctagaacagagctctgagtggggaataatcagttaatgctactgggcaaaggaccaatgtccctttatacttctctttgcctatgactcatgccctggaccccgccccatggaagcaaataaaaacctgagtccagagccccattgcaggatgttctcaactcctggatctgccacatccttctcaaagaccataaaattcttgctactggctcttactgtatttttggtcctgttcagatgttcccaggtaaacagaaccaaggaagaagggaaaaagagctagcatggggaagtgtccatggaaggcttaatatcttttccttcattgagatagggtttttggggatggttgattaggcttgaatttattagagtgctttcctcctaggacaaacctaaggccccatattgggaatgtgtatctggccaggatccctggaaccataaaatagggcacggtgtcttatgagaagtccttttcatactcagctataacctcagcatcccaaattgcacatggtgctttgctccaatgtcccagtgacccaactgaggggctgcctgacttcagctgtctttctaatctctacgaaatcatgagtcctgaggcctttcttggacattaagttctattatcacttcatataaagttcctgtactcctattctgggataaaagtatctgcagaccagctatgtggacgaaagtacaggcccttctgctcctttccaaccataaaagtctgtgatttttgttaatgatttccagtaagatttcacaaacaaatggccagagttttgaaactactgcttatgaaggcctgaataatttttagacaaggtaccattctcctcttctgtctgacacttaaaaccttttttctatgcatatataaatccacataaatatatatgtacctgtacttcttttttaaccaaaaaaggtaactatactttgctctaaaatttttaaaattcagcaatatattctagacatcttccttgtcagcacataaaattttgcctcattgcttctggaaattacatgttattccatcatatggatagatcctaatttatatacatctaatctctattgagtgtaaaatgaaatatttccagatctttgataaaacaaacaaaactgctactgaccttttgcatatatatatatatatatatatatatatatatatatatacacacacacacacttttttttttttttgagatggagtctcactctgtcgcccaggctggagtgcagtggcgtgatcttggctcactgcaatccctgcctcctgggttcacaccattctcctgcctcagcctcccgaatagctgggactacaggtgcctaccaccacgcccagctaattttttgtatttttagtagagacggggtttcaccgtgttagccagaatggtcttgatctcctgaccttgtgatccgcccacctcgggcttccaaagtgctgggattacaggcatgagccaccgtgcctggccttgcacatatatttttatatacttgggtaaaaatgtctaaacaagttcctagaagtcaatttgctaggtcgggtaagtgtatcattttgtttttaatgagcaccttttctaagtctccttgggtcatacatgactggatgaaatcacttggcttctaggacaaaaaagtaaaagctttagaaaactcaaattaactttttcatgcaaacctagaaaaatttgggttgtggcaacttctcaactgtaacactggtgtgaaagaaaaactaaatactttaaatagtgaagaaaatgaacttttaacctagaactttatatccatctacactgctacttaaatataggagcataataaaaaatattatcaagcgtaggaggactcagaatgcttgccacataaagactggaggaaaaactcaaataaaaagagaaacaaattgtaccactgccctccagcctgggcaacagagtgagaccctgtctcaaaaaaaaaaaagaaagaaaactggagtggcaatcttaatatgtgacagagaagaattcacagcaaaatgtataataaatgacaaagagatggtttacatactgataaagaaatatttgaggttgagcacagtgactcactcctgtaatcccagcactttgggaagcccagacgggaggatgacatgaagcctggagttggaggccagcctgggcaacatagtgagacctgcatctctacaaaaaaagttttaattagctggccatggtggtgcatacctatagtcctagctacttgggaagctgaggcaagagctcaggaggtcagggctacagagagtgagccatgatcatgctaccactacactccagcctgagcaacagaatgagaccttgtctctaaaagattattattattatcatttgttattattgagctacaagaacatattagcaactataatttcagctttcaaatttacaaaacaacaaatgacagcacttcatggataagtcaacaatagtatttagagatcttcaactcaaatgttaacacttgattgagagcaacacattgaaggtctagccaatatattcaataagtttgaatgtattgaatatatatttatatctggacatttctgtgctcaacagagagtaagcattcttttgagcacatataaaaatttgcaaaaatgtcccacattttagaccacaaagaaaacttcattaaagaatagcatgccaaaaaaaaagaacagcatacagattgtattcccctacataataaataaaattagaaattaacactaaaagaatggcaaagaactcatatttagaaactaacacattagtctacagacataccaccctaaatgcaacaatcttgtctgatctcagaagctaagcagggtcaggccttgttgggacttggatgggagaaactaacacattagtaaataaacttttccctacctaagaaatcacatttactaacaagcaagtcacgtggatgaaccaagaacaaaatggtgaggtagaccccctgactgtaataagagggcatcataaagttacacagcaaagggcatggatcccagaagggataaaaaattggagccttttttacagtcagtctactacatggtattagaagtcaggacagcattacctcggaggggaagaggaacattaatgactggaagaggtcatgaagaggttttgtaatccttgttacctgagtagttttttctaagatgattcatccagctgtataccaataattagtgtacatttctggaagtatgttctacttccgtttaaactcaatttttaaaactcgtgcatagatttgttacatatagtgtctagatgtatactttacataaccttatccagatttccttcagctgttcttcttctatcctttttttcagcattcaagctgattcttctatatcctttggtcatttagcatgatatgtggtatcactgaagttacacagggtagcaaatttcagccattgttagttaagcactgaatccagttcctaaagggttcccaaaaatcctttgggaactattaagattaataatacaacatcaaggcatgatgaaatggacaatgatatcagatgcatttcccaacttatttttcttttttcattaaagtatgtggcattagaaaaactattcagattcatttagcaatcaatagccagattttgttgttggatatctaagtgatggtggttctaaaagtaaaaattgtcagttgcctgtactctatcccatgagacttggtaaattctatgacttacctatacgttttctgtaaaatgaccaaatgccttttacaagcatttctcaaaaataaaagcaagcagatttccatccaccttggagatgttacatctttaagctaaatgttcctaaaattaatatggaaccatgaaagaccttgaatagcaaaagcaatcttgagcaaaaagaacaaagctgatcacatcacactacctgacttcaaaacatactacaaagttatagcaaccaaaacaacatagtattggcatcaaaacagacacatagaccagcagaacaaaatagaaaacctagaagtaaattcacacaactacagctaactgattttaaactaaggtgccaggtacacacaatggggaaagtatagcctcttcaataagtggtgctgggaaaactggatatccacatgcagaaggatgaaaccagactcttttttctaatcatatacaagtattaactcaaaatggattaaaggcttaaatgtaagacccaaaactatgggaagaaacatgggggaaaagctccacaatattggtctaggcaaggattttttgtataaaacctcaaaagcacaggcaacaaaagcttgtctaatcacatatagacaaatgggattacattaaaccaaaaagcttctgcgtagcaaagaaaacaactaacagagcaaagagacaacctacagaatggagaatgtatttataaaccacacatctgaaaagggactaacattcaaaacatgcaaggaactcaacaacaaccaaaaaaaacccaattttaaaatgggcaaaaaacctgaatagatatctctcaaaataagacatacaaatggccaacagatatatgaaaaaaaaatgctcaacatcactaagcataagggtaatgtagatcaaaactacaacgagatatcacctcactccattcagaatgactactgtaaaaaaaaaaaggatagcaagtgttggtgaggatgtggtgaaaagggaacactcacatactgctagtgaggatgtaaattagtacagacattatggaaaatggtttggaggttcctcaaaaaattaacaatataattattatatgatccagcaatcccactactgagtatatatccaaaggaaatgaaatcagtgtgtcaaagagatatgtgcactcatgtttgttacggcactattcacaatagccaagacatagaatcaacctcagtgtccaccagcaaatgaatgaataaagaaaatgtgacatatatacgcaatggaatattatccagccataaaaaaaaatgaaatcttgtcatttgcggcaacgtggatgaacctagaagacattacgttaagtgaaataagccaagcacagaaaaagaaataccatgtgattgcactcatatgtggactctaaaaagttgttcttatagaagtagagagtagaatagtggttaacagaggatggggaaggcagaacaaagggaagaaggtgagaaacgggtcagtaagtataaaactacagttagataggaagaataagttctggtggtctattgcatagtaatatgaccagagttgacaataatatattgtatatttcaaaatagatagaagagaggtgtttggatattctcatcacaaagcaatgataaatgtttaagataatggatatgctaatttccctaattttatcattatacaatttatatatatattggaacatcacattgtattccataaatatgtacaattattaagtgttaattataaacttaaaaaatggttgtcgcctcttaagaatttattagtgtgtggatattctggctaagatataaacttttctatagtacagtggttctcccgaccaccagcatcagcatcacctggaaacctgttaaaagtgcaaatttttaagcccattacagatctactgaatcagaaactctgagggctggcccagaaacctgttttagcaagcccctgggggagactgtggtgtatgcttaattgtgagaaccagcaaataatctactacaactatggttctgagatctctagttaaaacaccgattttcttccatttgctgcctcatggagcaattgttttttaaaacactttgttgaaatatgactgatattcaaaagctgtacatatttaatgcatacaagttgatgaatttggagataagtctacacctgtgaaaccatcatcaccacaatctatggtataaacccgtccttcacccctaaaagtttcctcctgcctagcgcaatcatttttaagacattttaagtgacaattgtggacccaatttcagttgaaattcctatacttgtggtatgggaaatgtaaacaattcagctgaggtggaattaaattagcttccttggccaggcgcagtggctcacacctacaatcccagcactctgggaggccgaggcgagcggatcacctgaggtcaggagttcaagaccagcctgggcaacatggtgaaaccccatctctacaaaaaattagctgggcatggtggcatgcacctataatcccagctactcaggaggctgaggcagaagaatcgcttcaactggggaggcggaggttgcagtgagccgagatcatgccaccgcactccagcctgggtgacagactgagactccatctcgaaaaaataaaaaataataaaaaataaaaatcagcctgctttatacaactaatttcacataatcttgccaaataaccccagtttctgctatctagcaagttccttggacattgatggtaaaatgcttagaaatatgatatataccaaacctggctttgtttacataattttccttaatgaattctcttcagtctgcaggatcgttgtgaagattacagatacagtggctctcattgttatgactatgagcatcaatatcttgaattaattacctttctttactcttttcagtctgcaggagccaaaaatcttgctggatcataaaaggacactgcaggaaaaactgcaaacctggtgaacaggttaaaaagccatgtaaaaatggtgactattgctgcattccaagcaacacagattcttaaccacagagaccatccccaatcacctaccgcaaaaacccaaacttttggtaataattttggaaataaccaaatgtatcagtaataatcattatggaccacaagaatttagagtgaagcagaaaaaaccgggggatttctcggataagggattgtcaactattcgagtctctctttcatgggtccattaaagcacatgacctcctgtctgctgttactcatctctgttctcacagggctggattaagaccttgagctgctcatggcactgaaaatatcatggtgtcccatccccaccaatatttaattctaaacaaaaacaatgataaactaattaaatagaaggaaatcccgaagactttcagtattttccatgaaaaatactctcttgttcctttcagataaataaattggattgggggggggggaatgatgagaaatcgagccaaaaggcaaaggaagctatcaataaaacataactgctggggcagtggctcacgcctgtaatcccagcactttggaaggctgaggcgggcagatcacgaggtcaggagattgagaccatcctggctaacacagtgaaaccccgtatctactaaaaatacaaaaaaattagccgggcatggtggcgggcgcctgtagtcccagctactcgggaggctgaggcaggagaatggcgtgaacctgggaggcggagcttgcagtgagccaagatagcgccactgcactccagcctgggggacagagctgtctcaaaaaaagaaagaaagaaagaaagaaaacataactatgagggttttaagaaggtgaccttagccatgcagtgacaggatgagtacagaagccaaattttagtaagatgaatttgggggaagaagaaagaaaattgataaacctctagctagattaatcaggaaaaatttactggtgatgttcatcctgaacctagaagcaaaagttctaaacaaaattttagcaaatcaaatccaataaaatataaaaataataatacatcatgaccaaaaaatacatcctgcataatacataatccttcatgcctcagaagtggaaggtcggtttaacattcaaaaatcaagcaatgttgtagcattattcacaatagccaagacatggaatcaacctaagtgtccaacagcagatgaatgggtaaagaaaatgtggtacatgtacacaagggaatactgttcagcctttagaaagaaggaaatcctctcatttgcaacaacatggataaacttgaacctgggggacattatgttaagtgaaataagccaggcacagaaaaataaatgatctcacttacatgtgaaatctaaaaaagtcaaactcatagaagcagagagtagaatgatggttactaggactggggggtggggagaattggggaaatgttggtcaaaggatacaaaattgcatagacaggacgaataagttcaagagatctattgtacaacattgtgactatcattaataacaacaaattatatacttggaaattgataagagagtagattttaagtgttcttaccacaaaaaaagatacatatgtgataatgcatatgttaataagctggatttagccatttcacaatgtatacatattaatatttcaaaacatcatgttgtatgctctaatatatacaatgtttatccattaaaataaatttaaaaagtaaagttattcgtgtttcaagtgaaagaaaaaagggaccaaggcaggagaatcactccaggccaagagttcaagagcaccctgggcaacctccatctctacaaaatttttttaaagaagaaaatcaagcaatgtaattcactgtattaatgaagcaaaaaagaaaaatcatgtagtcacctcagtagacacagaaaattggaagttgacaattccaataatctatttctggtaaaaataaaactaaaatagaagggaaccttttccacctgaaaaggaacatataagaaaagcctacagctaacatcacactaaataggaaaagacataatactttttcctgaagaatgtctggtctcaccacagctattcaacactgactgcaataaggcaagaaaaagaaatcaaaggcatcaagactcaggggctgagggaagtagtaaaactctattaacagatgacataattctctacatagaaaatcccaggccaggtgtggtgactcaccctcgtaatcccagcaatctgggaagtgaaggcaggcagatcacgaggtcaggagatgcagaccatcctggctaacacggtgaaaccccatctctactaaaaatacaaaaaaattagctgggcgtggtggcacgctcctgtagtcccaactactcgggaggctgaggcaggagaatcgcttgaacccaggaggtggaggttacagtgagccaagatcgtgccactgcaccccagcctgggcgacagagcaaaactctatctcaaaaataaacaaataaataaataaaataaaaattagaaaatcccactgagtgtaggagaaagctactagaacaaataggtgagtttggcaaagttgtagcctacaagttcgatatacaaaatcagttgtatttctatatgtcagcaataaacaatctgaaattaagttttcaaaataataatttataatagcaccgaaaatatggaatacctaagggaaaatctgacaaaaagtaagtaagcaaggcctgtttattaaaaactataaaacattgtggagtgcaatttaagaagacctaagtaagtggaaagaaatatcatttttatggactggaaaactcaatattgtgaagacatcagttttctccaaattggtctatagattcaatgcaattgccattaatatgccactaagattttatgcagaaattgacaaacatttttaaatttatatgaaaatgcaaatgatatagtatagccaaaacaactttacatgtggaaagattttcaaaatcattattaattaaggaattaaaaattaagatcagccaggtgcggtggcttacgcctgtcatcccagcactttgggagtccgaggtgggcagatcaccggaggtcaggagtcagagaccagcctggccaatatggtgaaaccccatctctactaaaaatacaaaaattagtcggacatggtagtgggtgcctgtaatcccacctacttgggagctgagacagaagaattacttgaacccaggaggtggaggttccagtgagccgagatcatgccactgcactccagcctgggcaacagagcaagactctgtctcaaaaaaaaaaaaaaaaaaattaaaaccacaatgagatgctgtattagtctgttctcacactcactgttatgaagaaatacccgagactgggtaatttataaaagaaagaggtttaattgactcacagttctgcattgctggggaggcctcaggaaatttacaatcatggcagaggcaaaggagaagcaggcaccttcttcacagggcggcaagacggagtgagtgcaagcagggaaaatgccagatgcttataaaactcagatctcgtgagactcactcagtatcacgagaacagcatgggggaaactgcccccatgatctgattacctccacctggtcccacccttgacacgtggggattataattcaagatgagattttgggtgagaacacagacaaacccctggcccctggtccctcccaaatctcatgttctcacttttcaaaacatgatcatgcctttccaacagtccccaaaagtcttagctcattccagcgttaattaaaagtccaagtccaaagtctcatctgagacaaggcaagtcacttctgcccatgagcctgtaaaattgaaagcaagttagttacttcctagatgcaatgagggtacaggcattgggtaaatacacctgtttcaaatgggagaaattgtccaaaacaaaggggctacagaccccatgcaagtctgaaatccaacaggggagtcattgtaccttaaagttccaaaataatctcctttgactccatgtctcacatccaggccatgcggatgcaagaggtgggcccccacggccgggcgcagtggctcacgcctgtaatcccaggactttgggaggccaaggcgggcgaatcacgaggtcaggagatcgagaccatcctggctaacatggtgaaaccccgtctccactaaaactacaaaaaattagccaggcatgatggcgggcgcttgtagtcccagctactcgggaggctgaggcaggagaatgacgtgaacccgggaggcggagcttgcagtgagccgagattgtgccactgcactccagcctggggcgacagagcaagactccgtatcaaaaaaaaaaaaaaaaaaagaggtgggccccccacagccttggacagataccactgtacaactactagaatgactaaaattaaaaagactgactataccaagtactggtgaggatatgaaggaactgaaacccttatacattgagaatgcaaaatgatacaaccactttggaaaaccgcttcctaatatgttaaagagtttcctaatatgttaaagttatggaataccccctatctctctgggaaaccatgcctgccatgcaatccagccaatctactcctaggtatttttctcacaagaccaaaaatcatatgtgcatacaaagacttgtacatgaatgttcatagcatcctcatttgtgatagtcaaaactggaaacaagtcaaatgtccgaatggataaactgtgatttactcatacaatggaatactactcagcaataaaaggagtaaactggtgaaacatgttacatggctgaatctcaaataatgccagtgacttatagaaaccagataaaaaaaaaagagtacctactctatggttacacttatataaaattctggtgaatgcaaactaatgtatagttatatctacaaaatagatcagaggtcttctgggggaggcaggagggagggattcctaagggacatgaagaatgtttgggggtagtagaaatgttcagtttcttgattgtgatgaaagtttcatgagtatatacgtgccaaaattatcaaattacgtactttaaacactggaagtttgttgtttgttaattatatctcaataaagcagttaaaaaaaaaaataagaacttggccggacatggtggctcacgcctgtaatcccagcactttggagaaaatataatgggaatttaaatcacatagggtcttgcaggcctttgaaagaaagccattcagaacctttgatcacaggatgataagagaaatgcagattaaaacaacagtatgagggaggctgaagcgggcggatcacttgaggtcaggaattggagaccaacctggtcaacatggcaaaaccccgtctttactaaaaataaaaaaattagccgggcatggtagcgtgcacctgtagtctcagctacttcggaggctgaggcaggagaatcgctcaaacccgggaggcggaggttgcagtgagctgagatctcaccactgcactccagcctgggtgacagagtgagacgctgtctcttaaaaaagaagaagaagaaggaaaacagctttcagcataataaaaatctaataagtaaacagcaatggaaagttcaggtatatttcttaatggatatggactgcatttatcccttgacaagagtggctggctgtgggcagtggaccagggactcgcgggacaccatggactacatggactacacccacctagcttctcccctgtgatgagtccttccgcttcaggccttttttttttttttttttttacagcccttctccattcccaccaccaccactaccgtctcagatatgagatcaggctctgtgaattgggttaggggtaatccagattttcctgcttttctgtagcaagagcgaaaaaaggtgtttctcaagttcttcagtttagaaagggtcagggatctctgcacttatcaggacatgtagagaaaccattcataaaattaagaacatagatttgtatgcttagaaggaactagaaaagacattctttattctatatagaaatccatcctatttaatcacttagaccctgcttgaaaaatgagttatagagtaccccctccctctctgggaaacaattccatagtaagagagttctgcctgttagaacatactaatctaaaattaatttggaggccaggtgcagtggcccatgcctgtaattccagcactttgggaggccaaggagggaggaccacttgaacccaggagtttgagactagcctgggcaacatagtaagacctgtctctcccaaaaaaatttttttaaatattcgggcatggtggtgaatacctgggcagtcccagctactcaggaggctgaggtgggaggattgcttgagctcaggagcttgaggctgcaatgagctgtgatcgcaccactgcaccctagcctgggctacagagcgagatcctgtctcaaaaaaataaaaacataaaacaaaattaatttgaaaatagcccaccaccatgctacgctttccacatggttccatccagaagagaagtctcctcaatcacatggcaaccctgctaattcccatcaattattctcacagtgaaagttatcaattccagaagagaaaaatcagcaacctcctctgtaaaagctttacagagacttttagagccgagtaaacaagagggagcaaaagttgaaacacgatgaaaatgcaactaaagcaatgcaggacctaggctgactctgggggtgacatcgaggttccacatcccaaaggcaagtctaaatgttggggtcttcatggacagctcccagacctctgatgaccctcatggtgccgttgtcaaaggtaacatcccaaattattgtagatctgtcttcagcagggatttttttttttttttttgagacagagtctcactctgttgcccaggctggagtgcagtggtgcgatctcagctcactgcaacttccacctcctgggtttaagcgattctcctgactcagcctcctgagtagcttggattacaggcacccaccaccacacccagctagggaattttttttttaatgacattgggtagcatccccctttgagtcttataaatgatctccctcaaacttctgcagcaagtgacttcttgggcaagtcattttccctgttgggcacatatgtaagagagggatttggcttatagattgacatgtgttcattatcgtttatttccacaaaccttcactgagagcatgcttcgtgccttgggggctcaaaaatgaaagacacgttccctactctcaggaatttcacaggctggtgcggggagacacacagataagtagaccattcaaaagtaggtttatgctagagtgagaggggctgtgaagaagggctgagccctaatgagagatcggggaaagctagggaagatgtcccagtgtgaatcttccctctccattgctccaaacacctcctcaaaacctgtgacttgtaaccctctgcatgccctcccagtgcctggatcaaatgctcagcttatgtgccacacactagactgatgttatgcatggataagctcttagatatccggctggttctgtgcccatccctctgcccccactgcagagaggccaataaaactcttgttcagactcacactgcacacagtattctgaactcctggatctaccacctcctgcttcccaaggaccatgaaactcctgctgctggctcttcctatgcttgtgctcctaccccaagtgatcccaggtaatcagaggtcagggaagatacaaaaatagaggtatagtgggttctggctcatgaaaattccaatgtgtcacggtactccccaacatgggcagctccacagttcccacactgggactatgctcctggctggggtaaaacctgggagtagagcaagttatcctcaatagacaggggcagtcccaccatccagagttgtccttggttctatattccaagttgccgcctaagaaactaggggaaagctcggctcacatctgttctctttccagattgtgccagcttttgaaaatgattcctgcagcccactttgctatgttttcttggccctaaaagtcctgctatagctataatgaggttctttttgttttctaatattctagaatttggtgaacaagtcagaaaacactggtagagctgttacacggaagacagaactggcttttcttcttccttctacagtgaaaatctaagcttttcataatcactgctttcttaagtatatctaaaggcatgaccagaactttgaaatcactggtgaagagagcctgtttctcctttatgtttttcaaggtgcatttcaatgtatgatcgaacttacataaaaatgaatctaaatatttctgttttataacgaagtaagcacactccctgcatggctatgcagcactcttgtgtttttttttttttttttttttgaagatggaatctcaatctgtcacccaggctggagtgcagtggcgcaatctcagctcactgcaacctctgcctcctgggttcaagcaattctcctgcctcagcctcccaagcagctgggattacaggcatgcaccatcatgtccgactaatttttgtatttttagtagagatggggtttcaccatgttggcaaggctggtctcaaactcttgacctcgggtgatccatccgcctcggtctcccaaagtgctgggattacaggcatgagccaccgcacccggccctatgcagcactcttctttcacttattattttgtggccatctttccatgtcaccatctaaagatctgccttattgtttgtaaagttgtatagttctgctgtaggataagccatataaagtcatatatagccatttgagacatttcttaattttcgaacaagacatcaatgaatatgcttgtacaaacattaatatatttacatatatggatatgggcttaaataggatagattcctagagggcaaataaccaagttaaatgtaagtctggtgggggtgggcaagaaaattaaaaatatatatttgttccattaattcctctattcctctgccctcattgcagagaggccaataactcttgttcagactcccactgcacacagcgttctgaacgcctgggtctaccctggcgttcagggtagggaaacagggaaacctctcctgtttcccagggaccatgaaactcctgctgctggctcttcctatgcttgtgttcctaccccaagggattctgggtaaccagaagtcagtaatcagaagttgtgtatcttaaaggacactgccagcagaaattgccaactctgggggtttttagtaattcttcagttacaattccagacacaaacaggaataattctgtgtgatcactttgaaagcaattgtgtctgctttgagtgctagtggagatattgagactaggaaagagacagatgtgaaagattttgtacatgaaatccacaagttataaaaactcagcatatgggaagtgaaggaaatattacatgatctggggtttcaagtctgagtgttaagagtgataaattggagccatcctcttggagcaaagagttaagataatgaaagaagcataaagtcttgatgctttatcttaaaaagcccctacatttggggaagaagaatagaaatcagtgacatttataggaacagagatatctccctaccctctcaccgaaaatacacaagggtttttctatcaccataatccttcaaacacccagctgatgagtataaaataacctcttactgttgtggttgcttttttgtatttgtttctgttttgaaacagagtctcgctctgttgcccaggctggtgtgcaatggcgcgatctcagcttgctgcaacctctgcctcgggggttcaagcgattcccctgcctcagcctcccgagtagctggaattacaggcacgcacaaccaagcctggctactttttgtatttttagtagagatggggtttcagcacattggccaggctagtttcaaactccggacctcaagtgatccactcgcctcagcctccctcgtgctgttgttttaatctgcatttctctcatcatcctgtgatcaaaagttctgaatggctttctttcaaagacctgcaagattctatgtgatctcaactcccattatattttctccagttactctccacttaacttactctatactcaccataactaccttattgtttttcagaacctttgagacaggtcctgcctctaagcctttgcacttgctgcttcctctgcctgatatatactctgcccccagttagtctcgtagctcgccctctctcttccttctcaaacctcaagggaagtctttcactatttcccttctaatcacacacttcctaaaccccttccctgcttcgtttctctccataatgcttatcttttttttgtattttcataatgcttatagtatgtatcccacataaagtatgttttactttcttctcttattatctactttttttctttttcttttttttcttttttgagacagtctcgctctgttgcccaggctgaagtgcagtggcacgatctcaactcactgcagcctccgtctcccaggttcaagtgtttctcctgtctcagcctcctgagtagctgtgacaataggcatgcgccaccacgcctggctaatttttgtatttttggacatatgcttattttatactttggtttataattttttatttttttaatttcaatagctttaggggtacaagtggattttggttacatggatgaattgtatagtggtgaagtctaagattttagtgcacccatcactggagtagtgtacattatacccaataggtagtttttcatccctccccctcctcttactcttcccccttctgagtctccaatgtccattataccactctgtacgcccttgtgtacccatagcttaggtcccacttataagtgagaacatgtggtatttgtttttcaattcctgagttacttcacttaaaataatggcctccagttccatccaagttgctgcaaaagacattattttgttcctttttatggatgagtagtaatccatggtgtatatataccacattttctttattcactcatcagttgataggcacttaggttgattccatacctttgcagttgcgaattgtgctgcaataaacatacactacacagatatattttatatactcatgtgaatgtatactttgcagtagaatgggatatgaccaatgcaaataacttaatcacacttgttgaagtagcaacaagatgtactttctggccgggtgctgtggctcacacctgtaatcccagcactttgggaggccgaagtgggtggatcatgaggtcaagagatcgagaccatcctgaccaacatgatgaaaccccatctgactaaaaatacaaaaattagctgggtgtggtggcgcgtgcctgtagtcccagctactcaggaggctgaggcaagagaatcgcttgaaccagggaggcggaggttgcagtgagctgagatcatgccactgcactccagcctggtgacagagtgagactccatctaaaaaaaaagatgtactttctttactcaggtacctttactcacagggtacaggtagcttcattataagtggccccaattcctcatgactaaagtttcttttcattgatcgtaagattcatcccactttcagaatagttaaaaattgacaaatgggaggttgagtatttgccagacctgaggtgggagtcttgcagctgtcatctaattatgatccacagtgtggatataggatgcgagatatacagtcatgctagtgaaattgagagcatcagtaacccaaaatcaatggtctttccttttattattcagcctatagtggtgaaaaaaaatgctggaacagatcagggcactgcaggaaacaatgcaaagatggagaagcagtgaaagatacatgcaaaaatcttcgagcttgctgcattccatccaatgaagaccacaggcgagttcctgcgacatctcccacacccttgagtgactcaacaccaggaattattgatgatattttaacagtaaggttcacgacagactactttgaagtaagcagcaagaaagatatggttgaagagtctgaggcgggaaggggaactgagacctctcttccaaatgttcaccatagctcatgacttcctctcggctatcactcacccctgtcctcagagtgataaactaagtcacatacagataaagcactgaaaacaccacagtgaccctcccaccccccaccaatatgtaattctattaatagaaacagctgtgtaaagaagtctaaaattttcactatttccaatgataaactcttcagtgctcttcttgaaatgtcacattatttccacaacaagttataacctatttttagtatttcttgtttgctagtgacctatgcacaacttcaatagcttagttagctattccaacaacaatttcttcatgtatcgttctgtcttctcaacagctgtcttcatggcagcataagtggtcatgatcaaaattctaaatctttgcatctgtgagagtagctactatgacactaaaagctttttttctagaacaggagacacttcaggtgaaagcattcattctcctactaactatggccttggagccaggttttatctctcactgtaggaaattggccgccccaggtgtgagctatgaagactcctttttgccccagtggctttggggttgaaatgctgtcgaaaagcttttatggctctgtagacccatctttttgaccaagccttgatcacacatggacatccaagggtaatcatggacccccaattgtgggtgaaaggatggatcatttatctacctgattactgagagctttatttgtctccctctgatagcaaaaaaaaaaaaaaaaaaaaaaatcttcacatcctatcccatccacataactctacaacagacttcattttacaaattttccaatcttgctctttccaagtacctaaacaaccagccaatctattaccagcgttcatgaattactatagatccataccaagccttccttctactggaaggttttcccttaaccactgtcttttgggccactgccatatcatgctgtaatgcagcacttctgtctggtgctagcatgtcatgcagaccattccacaaacctggccttgctttttcctcctttattaagtaaccataggaacccctcatgataccattagtgtgtgatgaagaagaggcaataaagcaggaatgggtgccataggcatctgaaccacctgcttctgcagtttatgcttgccagacctgctaagttccaattttgaacatattactttcaactaacattggaattcttcttcacaggtctaattgtattattcaaggggttagataatacctaattcatgacgggaaatttctgtctcattatttttttaaacttgttattcctgataattctgaaatttgaagtctttgaaagtctgaatctctagactgatttctgctgaccttaattcatggtgccttatttccttgtgtgttttgtgatttggggctctgctctgtttattttcctcagaagtttagttgagtaaactagttgagtcctgagttaaaggtctactcctttgttttcttctgtctttttggcactactagtctgggacaactttaaacttgattttttttttcatacgacccatgtactgtgaattcaggctgagagactttatgagatctaccttgaggttataaattctcagtgaagattttttttctatttactgaatacttaggttcataatcaggcaattttccttgaaaacctctggtgaaggaaaaggaatgttttatgtatctgctttatttttacacagcatacataacactttaaggactgagatttatataggggtctcctattagactcgcatattttttcagaccctagtcactgccttctctcccctgcttacccccaccttggccaaagccatggaaaccaaaactcaagttcacctgattcagcaagtacctttgtgacaaaagctagcgtcagttactgcctgtgaaagagtgcccacttgcacttggttttaatattcttttttttctttttttctttttttatttatttttattttttgagacagagtctcaatctgtcgcccaggctagaggacagtggcgcaatctcggctcacagcaacctccgcctcccaggttcaagcgattctactgcctcagcctcctgagtagctgggattgccagtgcacgccaccatgcctggctaattttggtatttttagtagaaacagggtttcatcatgttggtcaggctggtctcgaactcctgacctcgtgatccacccgccttggcctcccaaagtgctgggattacaggtgtgagccaccgcacccagacggttttgatattcttggccttactttcttgcaaggttaaagatgctttaaaagttttgttgtatattttaagtaagtttttttcactgttttcagtgggaggatcagcctgggttcctcaaccagtattcttcctgaaacagaggtccagaaccaacacttttgtccagatcataaaccttgttgttgggatgggtggcagcaccagaggaaggagaaaaaaagatcattgtcaaaggatgaaactatcactcagtgtctaaaaccaaaatgctgaaatgattgctttcttaagaacaggaaagccatgctggtccatcataagctccttcaccagagtgaagtgttgaacttacacagcatttggggaacacattttgagggagttgtgttggttacagaggtgggaattggttaatgacaatttagaagtgtgtacactgaaatgaattcaaagctgattggcataatcaaagcataaggctgtcactgacaatgagctttcagaagtgtgttcactgaagcaagttgtcgttgatcaatgaaaaaagtttaaaacagttcaaggtatgtacttattatcacgaccataggactgtcagccttttcctaggaatgtggagagtttttattctcagaagagaagagtaaccccagaagaatccaatgagacaaataacagaagaggaaccccaaaagatgatgtagaagggggagcctgaaagttaggaagaaaacaaagagtgaaatcacagaaccctaggcagttaaggttttcaaggggggaataacctatagtggaaatgctgcctagaggcagattgagatacaagttgaggaacattctgaaactttcaaaacggaggtccagctacacttgtttatatttttgtttaacttgtggacaaagatttatagacaggtgcaaaaaataaatcctcttttgcaacccagaactcattgttcggtatgagttttaatacatataagaagggatattatgatgaaaaaaaaaaaaaggaggtccactggtgaccttggccagagccagttcaatagcaaataagcacaaaggcaaactgtaatgagttgaggagaatcagagaagaagagaaagataatgggttaaatactactctacttttgacagaatttagaactgctagtgggaggtaagacacaaaaagtaaaattagaattttatattaaaaagctggtgttagttgtcattgggggcataagcctcttaggttttgaagaattggaggaccttaactatcaacaacaacagcatccaatattcaaagaccttctgcaataaccaccaaacaggcccttcagcctcacagcttgaaaccaacacagcttattccacattacagcagctctgttggttataacgttttttcatgaactaggccaaagttgtctacaagatctctacctactgccctatgtatccatcccactggttaaagatcctccctgagttctacatggcacagattaagtcataaatctgcctaaagccttcgaccctccctcattcgattcattcttcccccttcctcaccggcttgtctagcttctctgtaattgtttccccagttttccagccttctttctcatggggctcacccagaatgagacagacattgtcaccatgcaaagcccagtctctcactatgatttccagtggaccaaagacagacaagggtagcaggcacatgaattttaatgaggggggttgacagcaggtctctgtgcccagagagcttgagaatggtaatcaccagcactcaaggtagtcttggccactgcttctcataagaccagtcggtattttcctctttgccagaaatgcttatcctcatgtaggactggaggcagcaggactgacaatttctgcaatagaggtagggctgttcgttctttttgcaagaggccctacaaattccactgttacccatgcatcgaaggatgtggcgtttgcctgccaaaggaaaaaaaatacaaatagttaattcacctaggagtgacataaatctgataagtcgggaagcatcataaaaacctaaagggggagcagggagaaaacctaaaggacaatagtgacttctacttccagaaaaaaaagagtcaatgtctttttctctatttgtcctgccaagttcggtttaaaaccctgggtctgtgtgtgtatatgtgtgtgtgtgtgtgtacactctgaaaggtaaagtaaagaagaacaaggcagggacctcaggacctaaggaaggacacagccatgaattccctgggttttctttttgcctcatcgattccagacttgtgctggagagactgacaacctggaaacacaaacgagtgcagacatagagtcccaagaaaagtctcctctctctagccaaagaaccaggaaaggtcaacctagcaagaaagaacaatttagacaataaccactccactccaggaaaaaccaaagacaaaactacactcccactcatacatccaccaaagaaggctacgtggagagcctcgacttctgccctctccatgctgtaaggaggtgtaacctcccagagtggaacccaagtggggagcggggactattatcactgctggatggtcacaaggcccatcaccaccatgcagtgtcgataggaatcatgtgggaagcctcgacttcccctatctggtgggaagaaggcatccctccctccacttccctgatggggtggtgacagagagggcctagtgcagagtcaagactttcaccaccacacagtagtaacagggccaccactccctgagatgtgacttggaggccacacggggaacagaacatccctccccatcccaaccaaggcagtaccagaggaaatacacctggacttccacccacctggcagtatccaggcagcatcccactgtcctcaccagagctgtatcagaggagacaagccaacaaagatcattgaaatatgatccagcatctcataacataataatatcaaaaacatccgcgttccagcaaaaattactcatcatactgagaaccaggaaaatcttaactttaatgaaaaaaaagacaatcaacagaactgagagcaacccaagttgtgtgtatctatagttcattccttttacttctgagtaatattccacagtataaatgtagtacagtctatttaaccatgtgtctgctgagggccattttggttgtttccaggtctattaggagttggggatttttttctttaagaccatgtgtttctttatttaacaacttctccccaaaaggaaatgtttttgaaaatccctatcgtttataaattgaagaggaacaacctgataataggtgaaattttcaataaaatgacaggaacatttaaaaatacaatggactaaataaagatttttgtatactgttgcttctagcaataataaaataggtaatttggaacaaatacctggcagatgaaaagtggacacttttttttttttttttagacaagtcttgctctgttgcttaggctggagtgcagtggcgcaatcttggctcactgcaacctccgcctcccaggttcaagcgattctcatgcctcagcctcccatgtagctaggattacaggtgcacgccatcacacccagataatttttgtattttcagtagagatggggtttcaccatgttggccaggctggtctcaaactcctgacctcaagtgatccacccacctcagcctcccaaagtccactgcacccagcctggacacatttttttaatttgtcggaaggcattaaaagacaaaataatggaggttgagtgggcctaaactaagaaaaagtttggaaaatcactatttttaattttagctgctctaataagtatgtagtagtatctcattctagtctttatatgcatttccctaatggctaatgatgttgaacatcttttcaaatgcttatttgctatctctatatcctcttcagtgaaatgtcttttcatatcttttgtccatttctaattgagttgtttattactgttgagtcttttttttttgtggaagaagtctcgctttgtcgccaggctgcagtgcagtggtgtgatctctgctcattgcaacctctgcctcccaggttcaagcaattctcctgtctcagtctcctgagtagctgggattacaggtgcatgccaccacacccaactaattttttttttttttttttggtgagatggagtctctgtctctgtcatccaggctggagtgcagtggcactatctcagctcactgcaagctctgcatcccgggttcacaccattctcctgcctcagcctccccagcagctgggactacaggcacctgccaccacgcccagctaatttcttgtatttttagtagagacggggtttcaccatgttagccaggatagcctcgatttcctgacctcgtgatctgcccacctcagcctcccaaagtggtgggattacaggcgtgagccaccatgcccggcaaatactgttgagtcttaagagttgtttctatgttccagatacaagttctttgtcagatatatggtttgaaaataatcttgccctgttgtaatttgtcttttcaaccatcctcttcacagggtgtttcacagagtgaaagtttaaaattttgagtaagtgcaatttattgattctcttcttttctaggttgttcttttgtatctaagacctcttcaccaaacacacggtctgaatgttttttcccatgctttcttctagaaattttatagttttacattttatatttaaatatatattcctttaaaaataattctctttagagacggggtcttgctatcttgcctgggctggagtgcagcggcacaatcatagctcactataacctcaaactcctggactcaagcgatcttcccaccttagcctctcgaatagctgggaactagaggcacagtcaccacactcagctaatttattttatttttgtagagatgggatcttgctatgttgcccaggctggtctggaattcctgggctcaagtgatcctcccgcctcagcatcctgattcactgggattacaggtgtgagccaccacgcctggcggttatgatccattttaagtaaatatttgtgaaaggtgtgacgtttaggtttaggtttagatttttttttttcgcctgtagatgttcaattgctccagcatcatgtgtcgaaaaggacctttcttccaatgaattgcttttgcacctctgtcaaaaatcagttggctgtacttctatgaggctatttctgagttccctattctgttccattgattgatgtacctgtttctccaccaagaccacacaatctcaattactattactatataataagtcttaaaatctggtaaaataattcttccaactttatcctttttcaaatttgttttagctattcttattcttttgcagatttctcttcaggcagggtatagacagaataatctggtctatatctacaaaaaatcttgctgggattttgacataaatgcctatgtcaatttgaggagaattaacatctgttatttgagtcttacaagataggaagatggtgtgcctcttcatttatttagctcttatttcttttatcaatattctatagttttcagcatacaatttctctacatagttcattagatgtacacttaagtgttttattttcttggagtgactttgaatggtattatatttttaacttcagagtgcacatgttcattgctattatatagaaatacaattgatttgtgtatgtttaccttgtatcctgggaccttactgaacctacttattagttttaggtattttgcctttgctttttgttttgttttgtttgtagatttcttaggattttctacataaaccattatgacatcttcaaatagacaccattttattccttcctgtctaatctgcatgcctttcatttccttttcttgcattaatgcaatggctagaaatactcagaactaaaaggaacgaattattgatacacatagtgtggatggatctcaagagcataatgctgcttagctgggcacagtgctcacgcctgtaatcccggcactttgtgaggccaaggcgggaagatcacttgagctcaggagttcgagaccagcctgggtgacatggcaaaacccatctctacaaaaaataaaaaattagccgcatgtggtggcacgcatttgtagtcccagctactggggaggctgaggtgggaggatcacttgagcccaggaggcagaggttacagtgagctaagatcacaccactgcactccagcctgggcgacagagccagacactgtctcaaaaaaaaaaagagcataatgctgagccaaaaaagaaatagccaatcacaaactctcacatatgattctatttacacagcaatgtcaagtgacaaagctatagagatgggaaaacagattagtggttaccaagggttaagcatagtgacagtgggtggggacagggaagagggctggtatgactttaaaggagcaacaggtggcagatcttcgtggtgatggaacagttctgcagcttggtcatgatggtggttacatctacacatgatgaaatggcatagaagtatacacatatattgaaccaatatcagtttcctggttttcatattgtattacagttatataaaatctaagcattggagaaatctgggtgaagagtacacaggacctctctcttgtaacttcctgtgaatctacaattatttcaaaataaaaagtaaaaatatcaataaataacctaaggggctatagagagattaaaaaaacaaaatctaaaaaacaagaatccctaggtgaccaatcccagttcccattttacttgctgtgtatcctggggcaagtttctgcacctccctgttctaccctttttctcatatgtatagtatagaccggaaaaatatctaacccctagaattttgaggattagtggctgaatacatagaaggcaataagggactgacacatagtaagaactaaatgaatgttaattattattgttgttttaaattatcatttgagcaagacccagaaactcctctgcatccttgctaaccctgccagccagaaccacgtagacctaacacagtggtcctctgctccctccagcccagaagtttctccacccagattcctggaacctggagtcagccttttgtgcccccaccagatccactcatgctttcactggtgaattcattattcatgttcaagaaacactcactaaatcgcattcgtgcccagcactgggcttaacatcaggcatgcagatgtaaataaaacatcatctcagcccctaaggatttccacctaatatgtgtgtgtttgggggattgatggaaaggggacaataattcaaataattacacaataacataatacgtgtcataacttcttaagagtgacagtttgtgacgccaatcaaaactcagtttggagaaaaagtgataacctagaaaagggacatcaaattctccatagcctttaaagagccagtaaacagagaaagaaatgttgagtgctgagggaaaagttcaagctagaactgtgtacgtagctaaaattttcttaactgatgatatagtttggctgtggccccactcaaatctcgtcttaaattgtagctcccataatccccacatatcatgggagggacccagtgggaggtaattgaatcatgggagtaggtttttcctgtgctgttcttgggatagtgaataagtctcatgagatctgtccaggcgcggtggctcatgcctgtaatcctagcactttgggaggccgaggtggacgggactcttgaggccaggagttcgaacaagcctggccaacatggtgaaaccttgtctctactaaaaaatacaaaaattagccaggcatagtggtgtacatctataatcccagctacttgggaggctgaggcaggagaatcgcttgagcctggctacagtgagccaagaccgtgccactgcactccagcctgggcaacagaacaagactctgtcttaaaaaaaaaaaaaaaaaaaaggccaggtgtggtggctcacacctgtaatcctagcactttgggaggccgaggcgggcagatcaagaggtcaggagatcgagaccatcctggctaacacggtgaaacccctgaaaccccatctcgactaaaaatacaaagattagcctggcatggtggcaggcgcctgtagtcccagctactagggaggctgagacaggagagtggcgtgaacccgggaggcggagcttgcagtgagccgagatcccaccactgcactgcagcctgggcgacagagcaagactctgtctcaaaaataaataaataaataaataaataaagtccaacaagatctgatggttttataaagggcagttctcccgcacacactcttttgcctgccatcatgtaaaatgtgcctttgcttctctgccttctgccatgactgtgagacctcccagccatgggaaactgtgaatcattaaacctctttttcttcataaattacccagtcttgggtatttcttcatagcagtatgaaaatggactaatacaatagataaggatacatttagatattttcaaaagtaaacccactgagagacttgatcaccaacaggagcttcttaagagtaaattacaagggtttaaaaatataattccatagaatgaataagatctggtatttgatagcataacaggatgactgcagttcacaataatttatcgtacattttaaaataactaaaagagtataattggattttatgtaatacaaagaagagataagtgcttgaggtaatggatatcccatttaccctgatgtgatcagtatacactaaattcctgtatcaaactatttcatgtgccccgtaaatatatacacctactatttatcacaaaaaataaaaataaaacaacttttaagataaaaaaaattcaccgaaaacaaaaaagtaaactataagaagaaagaaaagagttcttatatgaagatctgagaatcaaagtgaaggaataatagatatggtatgggaaatcaaatcatagtggatgagaggtgagtcacaaccacagtataaaacattaagtttaagcagatatctgcaatttgaaaattggaatttggaaaaagtgtcctctagtctgcaagtgtgctaattaggatcagctgagatccctccattctgacattatcctccctaaatacgtgaaatgtagacttttaacacaaatttttaaaaattttttctaatgttcagaaacagtttttccactgtttccatgtcacttcatgtgagtggtaagaacagtaatgatcattatcattcttttctttttgttttcaacctaacctgagtcaattctctctgccttctatttttgtaaaatatagacaccagaagacaccatcccaactgaatttagacaatgttattgtaaacttcaaaaataaaagaaaagaaaactgaaaaaaataagctactgctctcaccttaatcagaatgaatgtgaatccacaatacaattaacaaacatttctgccttagaccccaggaatacaaattaacaaactgctagacaagactattattctgctagatggagagtgaagaaagtctaaaagaggcaaggaatgatatcacctcaagcctcactgttttctcaactgaaaaatcctttttctactccagatctctactcaggcctcattttaggattccctgagaattgttcctttctcatagaatgcccatatcaagtgataatccaatgtctgccattactcagtgacagtttagtacctactttgtatcaaagaaacaagacaaataacaaaagacaaaaaaaaaaaaaaaaaacacagtttgattccctgctctatcttaatactgtgtgacttgggctaattatgtcacctctctggacttcagtttcctaataagtaagatagagataataagaggattgttgtaagaatggaatgacacatagcaagggtcaatgagaactattattatagctattataattgttaagaaataatgacacagggctgggtgtggtggctcatgactgtaatcccagcactttgggatgctgaggcaggtggatcactggagcccaggagtttgagagcagactgggcaacatagtaagaccctgcctctaaaaacacaaatagaaaaattagccaggcatggtagcgcacacgtgtagtcccagctactcaggaggctgaggtgggaggattgcttgagcctgggagggttaggctacagtgagccatgatcgcactactgcactccatcctaggcaaccaagcaagaccgtgtctcaaaaaaaaaaaagagagacagatagtgagacagagtttatgtgaagactttcatgggtgggagcatcaactgagctatgaaggatgagaaggcgttcatcacagaggtgagctgagtgttggggaccagctggagggagccatgaacaaacgcaatgtagggggcaggagaggatggcgagagggttgcagtggctgaagagaaggtctgtgagggacagtcatgggaggtgaaaccgggtcaccacgtgagggctttgaatgtctggaccccgggtggtgatgagcaaaggaagaaatctaagcaggagaatgacatagagaagtttcctaccaagaatccctctaataatagagattaatgcagagaaaacctgggggcagggagaccagtgaggaaccatttttggtgttctcaccccgggcctcggggcacaggtagctctcatgggcagcctaagtgtcccagctcccagagaagcagcaaaactgtgaaaagattatgcagctcctgcctctgaagtgggctgaaaaatagattgtgaacctaagtatgcatcaacagatgaacggataaagaaagtttgcataaacacaatggaatactattcggccacaaaaaaagcatgaagttctgtcatttgtggcaacatagatgagcatgatgttaagtgaaataaaccagatacagaaagataaatattacttgttctcactcatatgtggaagcttaaaaatgtggatttcattgaagtagagagtaaaatagagtttatcagagactgggaagggtaagtgggaagggagaataggaagaggctggttaaacggatacaaaatcacagctagataggaggaataagttctagtgttccatagctctgtagggtgactatagttaacaatcatttattgcgtattttctttttctttttctttttctttttttttttttttttttttgagacggagtctcgctctgtcgcccaggctggagtgcagtggcgggatctcggctcactgcaagctccgcctcccgggttcacgccattctcctgcctcagcctcccaagtagctgggattacagccaccatgcctggttcaatttttatatttagtagagacagggtttcaccatgttgatcaggctggtctcaaactactgacctcgtggtgatccacctgcctcggcctcccaaagtgctgggattacgggggtgagccaccgcacccagcctattgtgtattttcagttagctagaaagaggactttgcatgttctaaatacaaagaaatgataaatgtttgaggtgatggatatgctaattaccctgatttgatggttacactttctatacgtttattgaactatcacactgtacaccataaatatgtgcaattattatttgtgaatttaaaataattctttaaaagaaatgggttatcagccagagcaggatccaataccaggcacaaccctaacatttgcaggtcctgaggcaagaaggcaaatgaaggctactgtgtcatgtcctttgtctgcatacttaaatgttttaatcaagctaataaaaagaatacataaaatatatctatcctcatttacgagatagcccttcataatgacctgaaaggtcaggtttgaatttataattctctgattcctcagaactccatgcaggaacatggcattccgagggaagcctgcccagcccacagctcacctctcttctcacccatccctagctctgcccacagaccctgcaaacaagagcatcccttgatgcttctcctgcctaggggtcggcacccagtgggccccaccctccagggagggaccttgaggaaaggcccctgcagctccttgaagcaggcacaaggtttctctgggcaggcaatcccaggacccagctactcaaagcatgacccagaaagggaggagggcaggcagaggctcctcgtgggcatattccccttgctcctagcaactcctcaccccatgaggagggacttagccagaggaggggcccctctttccagagtctaagggcagaaatattgagctgagagcaaatagtcttcctggatgataatgaactccttctgtctgtctctatgccatgaaccatgctttaccgagcactcttggtccctggcctcactgcagaggacgcagttcagggtgaaaaactaactgtgttggttaaatggggcccagagaataggacttgagaataaagtctgggaagacacccagattctctagattcccaaacaggattcttaaatgttccccatgagtgagtcttctccccagctaaagtaccaattcaaatgagacaggcttctgtctccctcagactctaacacagttggaaggcacacagttcatatttcataaatccttgaataaatcaatgaacaataggtgacgacatttgttgagtgcttacctttgcattattatgtcatttcatccttactgcaatcctgaaatagattctacaattactctaatttacagaggaggaagatgaagttctgagaggtttatatgcagagtctgccagtagtaagtggcagagctgaagtgaatatgaatgaatgaatcggtgaaagaatggaaaaaatgaataatgaacaaattcatatataaataagcaaatcatgtgctttatctttttttagtactcagacaccttctaacccctggggctgggcctcttgagcactagaaagcatcagctggtttctctagaaccccaaggatttgggttatattcagccccatccactctcagcccattcactctcaagatggaccaactctcccagcctaaggattctcccactctttaggcatctgctatgcctttaaatctctcagctcccaccatgttctccccagtccactcctgactcaatagcctctcctgcagctggtagatggggaatcatcttcaagactgtaatgatcacaccatcgctatgacccagccctagtgacttctctcgactagctcttcacctccccctgccatccccccaccctcaatccatttgaagtatcattccttatgattgacagacaccagaaacaaatttgtgagttttaatgaaatgtggaccctaagcaacctgaaacaaagtcatttctatctattagttatatttgtcttcatttttggagctgttgtggacatctgaggagtggtccagccaaggattccatgaattgttactggttggattgttaaataacgactaggaacacagcaccgtttacgatttcggcagcgtatgatgctgtcttcaccatctttgcacaacaaccggcagtgtccatccatccaacactctactttggggcatatgaacaacaattaagcagatgttagtatccctcaagcggagagaaaagacaaggcagaggaggaacaggaggacagggaagaagagaagaaagccagctgagtgagtaatgccagacccagtcccaggaaaagagagaagagaccttgagagggaagagaactgagacaatggttccaactgagagctccgaagtttttgggagagccttttttggacttctcacccttctgtcttcctagcccccaacttcctactccttactttggaatcaactgaagctaattaatgtcccacctagcagagctagggatgaagggaaaaggacatgatcacctgtaatattagggaacgaagaggattcactcacattacacagaccctgtttcttatcaataacctgaccctatttcacataagcccaacaagcctcagctccagccgcatcccaatctgcaatcttccttgaccctatattaacccaattcaaactcaaactcattcaggcctgccttaattagaactcccagccttactcaactcaatgcccccaagccccaactccaagccaaaccctaatctaatctaatctaaccctaatctaatcaagtcactaacctcaattcccagcagtatgccatgaccaagctgaacccaatcaccctgcagcatccagcaccgactcccagcctcagcccaagccccagcctaatcctcaacaccagctccactcaaccccaaatcccatcctgtctccaactctgccctaaaccatcagggaagcccagctcctcacctccagctcatcctaatattccttctatcactccaatcccaaggtttttcctccacatcacaactcaccccagcttccactctagtctcccgaagtcctcaacaagtccccaacctgcacccacgctttgcccctcaaacctctcccaagctcccaccaggataccaccctggccctcaagcaccagatgctccaaacatctatcatcccaccactctggcaaaaaagaatcagagagagatattaacttgagatgatcctgggcaaacctcccgaagctgcaggagagaaggaaaggcttcagatgatgcccacagtgagagggaagggaaagacgggaagcccatgaccaggaacccagacccccgagagaggttcacgttacctgatatcactggttcttctatggccagaaggatggcaagaaacaggtaaagaagtttcatggctggcagacctgagaggaggaggtggctgagctgcaggggaaggaaatagggttccctgcagcacggcagagatgagctttgcttttatcagcagggctgtgggcagtgaattagaacaggaggggatttatatgaggtcatccaggccaaaggacagtgtgtagcagatgtctcagcaaagcacaagatgagagtgtgggaaactggccagtaccaatgccagtaaagggacaggtcaattaaagccatttggcctgtgagacccacaaaggaattaattaatgcataataaatacatatcaagaaatatttaacttaaaaattactttgcacttctctgataaatagtaagaacatttattcaacacatgtatttgtctctttgtttcttccttttgaattatttagtcagatatctggacaattctattggggtgttgttgggtacttgctgatttgcaagagctcttcagtgctgttattatattaactgtcttgtcatgtttggtgacaatattgttctccatgattatgttctgttttaaaatatattttttcctataaatgtttaaaagatatttaaatcttaaaaactaaattaaacaggccaggtgtggtggctcacacctgtaatcccagcactttgggaggcgaagacagggagatcacaaggtcaggagttcgagaccagcctggccaacatggtgaaaccccgtctctactaaaaatacaaaaattagccaggtgcctgtaatcccagctactagggaggttgaggcaggagaattgcttgaacctgggaggcagaggttgcagtgagctgagatcacgctattgcactccagcctaggtgacagagcaaaactccatctcgaaaataaaaataaaaaaattttaaaaaataaattaaacgagaattacttattctcagctttctaacagaaggatacacatgtgtctcagctttctaacagaaggatacacatgtgtaatgtctttcagaactttgaacttgccaatcttgtttccagttcagggccttagcagttgtcatctgttctccctgtaaagctctttctccaaatcttcccatgaaaatctcctgctcatcattccatatcatcccaaatgtcacctccttggagagactttccctggccaccttagataacggtaactccaacccacagtcactctggactgtaataacttggtttatgatcttcatatatgtatctattcttttaaattttattttacatgtttgatttttgtctctccacttagaatgtcagaaacctggcttataaccccagtacccataacatcacctggtgtattaagatacttattcaactgttttaactgatattccccccaaataagaatgattccaaaagacagacatggatttcttttttatgtaaaagtctgggtatgcagttaagtgtgacagcttcaccattcagcagggatctaggttccttttggcttgatgctctgccatcctcaagaggctgcatcatgtgatgaccctgagctgctccagttcccaccgtcaagttcccatccagccatcaggaaaggaggagtgatggaagtgaaatgcaacacctttccctttaaggacaccactcagaagtttcacccctcggcttggcacagtggctcacacctgtgatcccagcacattgggaggccaaggtcggtggatcatttgaggtaggagttcaagaccagcctggccaaactgatgaaacctcgtctctactaaaaatacaaaaaaaaaaaaaaaaattagccagacgtggtggtgagcaccgtaatcccagctactcaggagcctgaggcaggagaatggcttgaacccaggaggtggaagttgcagtgagctgagatcgtaccactgcactccagcctaggcaacagggtgagacaccgtccctccaaaaaataagaataataagttgcaccctttgcttccaatcctgtccacctcccagagctcatttagaccatcatgcgcagctgcaagggaggctggaaatattttccttattctaggcaaccatttctagctaaaatataggggttgtcttattaagaagggaaagagatacatggggggtggagttctagcaatctctaacatacctgacattaaatattaaataatatttaataaatatctgtagacaaataaatatagcttactttaataaataattatagataaataacttatacattgagtaaggctatgagaagtgatctagtggggaggaaacccaagtccctgtaactccagggctttgggaggccaaggggggaaccagattgagcccaggagttccagaccagcctgggcaacatatgtgacctcatcactacaaaaaaattttttaattagccaagtgtggtggtacacacctgtagtccctgctactcagggggccaagatgggaggattgattgagtcttggagttcaaggctgcaaaacattcaattgttgtttttctgccttccctgcagctagaatatggacacgtgggtaggttcagccaatcagatgactccatactattttttgaatcaggtgctcaagattccaggaagaaggaacagtagataatttatcttaacaaaggagtccattatgatgtccagtttccaggggcaatagggaagcagggcaaataggggtagagtttagggtcctgagcaatggcgtttggtggcagctgtgtcctcactagaccaggtccatggggtgatttttcactctggctcctcctacccttcctccctggttcctacccattttctaagcctcgctctaggaattctctgaacttccaaacagccaaaagattccctttgctaaacactcttacggatgcagtgaccatgggcaagttgtttaaccaattttggagataataatacgggctcatggtttgttgtgacctttaagtgataagtgcctatccagagttcaaaacagtgcctggcaggtagtaagtgctcgatacattttagttacaatttctttgtttccaggtaagggaggagagaatttagagccttgagcgcatttgacctctacagcctcagtgaaaacgaagccaagtttctctgttgtgtcagggattagggcttggagaaaataggcaagatctcaagaagcccctgtcaggcatggaggaaatacactgggcagaaagctgtgaggggggacctgcgatcagggctggatggctcaataggaggactgagcacctgcccaggctcagggcactggcaagacatgggccaaaacaaagcaagaaaatctaaagaaccccctttaatttcagtagacaggaatgctttgtatcatttcacagaagtaaaattttatttcagagttgaatgttgttttattttgaattccactgggagtgctgtaaacttcttggtgtttaacgttactaaagttgttcatgaggacttgcttggtgtgtaatggagctgaccaggataagggaatttgggggtgctattcagcagtgtgatgaacacaccaggcatgcaatttggtccaaaactgagcaacttaccatgtgtccttagcatgtcatgcaacatctacaggactcaatattgaaatgagacatcatagcagaggagttacaagcctatattctggagttagtctcctggctgtgttaccttataaaagttacttaaggctgggtgcggtggctcacgcctgtaatcccagcaatttgaaaggctgaggtaggcagatcatttgaggccaggagtttgagaccaacctggccaacatggtgaaacccaatctctactaaaaaatacaaaaattatccaggtgtggtgggacatgcctgtaatcctggctattcaggaagctgaggcaggagaatcgcttgaattctggaggcagagttgtagtgagccaagatcacaccactgcactacagcctaagcaaaagtgtgagactctgtctcaaaacaaaaaaaagttagttaacctctttgaatctcagtttcctcttctataaaatgggggtaataatatttcatagggttgatgttaggattaaatgagtgattacacataaggcacttcgaacaatacctgatacttgacttcaatataaatatgtggtgttattattgtactagaccagaagttcccaacctggaggttccaggcatttcctcactatagctcttttcaatatttcataagccctcttaggaatccctgtttgcaaaggactgcccagggagtactgtgatgactcagaaaaatggccttgaccaacataaggagaaattgaaaaagatgatttaattgcaatagaacgtttatatttcaatatctgggtttatatttgtgttgtattttgtttgtgtgtacttatgtatacatgtgtagatttgtgcaagtgtttatgtgctcaaattttatatattttatgtatattttatgtgtttatatggtttatatgtattttgcgtgagtatttgaatgtgtatgtgtacatgcattgattcttacattagtttgcatgtagacatgtagaacatgtgtttcagtgttgtttagtacctgtgtacatgtgcatctgttctcagatctccaaatgccgtagcctgagctccagtgagctcagtccctttgttcctctcaggtctctacatcctgtgactctggaacatgacagttgcttgatgattcttctattcagctaggagatctgggccaaggctaagggaagtatggggagcatcgtggccaagaagcagaggccactaagggaaaagaggccaggagatacgggatgaggggagtcttagtcagagagccaacttggcccataattgctgcctgatatcttctggggcccaccaagactagaacagactgtagcttcagcctttgtaatgcctcccacatgggtacagcctggcctggccagttctgaagactggacaccacccactccctcgaatctgtgcagttgcatttgtaagtccttgaaaagccacccattccctgcagcctaaattccacagcagggagagtagggaaccattcatactagttatcaagttcccaggaaggagttcacacaggccaggtatttttaccttatctcatttactcctctcactaacctattagtttaataatatgacaaaaagatgaaagaaataagagtcataaagtcacagccttttatggacatctttcacctccatgcatttacaccatctccttcctttcccagtgacgtaggaaaagtgtccaggcaagggtaggtggttcagagaaagataatatgaggaccaagtttgcataaaattgtgatgcagctattttagagtggctggattccagagaaatcctctacaccagcatatccccaactgtgtcccatttcaagcactgttccatggaaaaaaataaatgctagtgagaatatttatcctacaatttattaaaatattaacagtcacataccagctatgaatgccccccacactcaagcctcaggaaatgctgtaattacttatttgttttaagtgcagctccaagacactacttgccaaattagtgagatgtccaatgtcagttattattgggatttcatgccatcctccacttgatcccactaggaccccatggttctgggaaatggggaaggatctggtccttattcaatgatgatgacctttatttccttgctcttcatggttgggatattgctgatggactccattggctgttcattgaggtgtgtgtgtgtgtgtgtgtgtgtgtgagtgtgtgtgcgtgtgtggtgttgttgttgttgttttgttttttcttgttttttttttttgagacagaatttcactctcgttgcccaagctggagtgcaatggcatgatctcggctcactgcaaccttcgcctcccaggttcaagcaattctcctgcctcagcctcccgagtagctgagattacaggcacacaccaccacacccagctaatattttgtatttttagtagaaatggggtttcaccatgttggccaggctggtctcgaactcctgacctcatgtgatccgccctcctcagcctcccaaagtgctggaattacaggcatgagccaccatgtctggcccattgggtagttctgggcagctggaaaattgctcttcatcatgtctacctccaccaaccacgagctcagccatcaagacctttgctgcccctcccagggctatggtcacagtggctgtctccacagtgactgccttccatgcaggcaaccccgtccagcacctgctaccttggggtgcttcatcaaactcccttggagccaaacccccatctcctctcccagttctgaggaaattcaacacccttagatgccatgacactcctctctcttgccctcgaagctaaaattcctcatctcacttctgaaacgatacaatttttttcttccaaaagttttatacttttttaaattttattttactttaagttctgggatacatgtgcagaacgtgcaggtttgttacatagttatacatgtgccatggtggtttcctgcacccattaacctgtcatctaggttttaagcccccatgcattaggtatttgtcctaatactctccctccccttgccccccactccccaacaagcccaggtgtgtgatgttcccctccctgtatccatgtgttcccattgttcaactcccacttacgagtgagaacatgcggtgtttggaaaccatacaaattaattgccctctttgtgcctactcctcccaaataaaaaattgtaagggttgtcttcagggcaacccctgacctatgcacgcgcacgcgcgtgcacacacacacacacacacacacacggtttcaattccccagtagaaaaggaaggccaggatttagaacacaaaatcctgacttcctttccaaaaacaggacagaaaaatatcttttcattctttctgctgatatctgttcaaacaaaatgaggaaaaattttgaggtaattgctacactaaattcttgatacatcaccctgccaaaaagtttatttaaaaaagcattaaatatgtgtatatagttgatctgattaatacacaagactgagcaacttaccatgtatccttgcttttttttgttgttttttgagatgcagtctcactctgttgcccaggctggagtgcagtggtgtgatctctgctcgctgaaacctccgcctcctgtgttcaagcgattctcctgcttcagcgtcccaagtagcggggattacaggctcctgccaccacgcctggctaatttttttgtatttttagtagagacggggtttcaccatgtttgccaggccggtctcgaactcttgacctcaagtgatctgcccacctcagcctcccaaagtgctaggattacaggcatgagccaccatgcccagccaagttcttgcttttaaatgagaataccagacagtgaaggaaaatgttgcctaatttatgaaagcacaaccttatttatttatttatttatttatttatttatttatttattgagatgaagtctcgttctgtcacccaggctggagtgcagtggcatgatcttggctcactgcaacctccgcctcctgagttcaagcaattctcctgccttagcctctcaagtagctgggactacaagcacacatcaccactcctgattaatttttgttttttgtttttgtttttgttttaagatgaagtctcactctgtcgcccaggctggagtgcagtggcacgatcttggctcactgcaacctccgcctcccaggttcaagcgattctcctgcctcagcctcctgagtagctgggattacaggtgtgcgccaccatactcggctaatttttgtatttttagtagagacagggtttcaccagtcaggctggtcttgaactcctgacctcgtgatccacccgcctcagcctcccaaagtgctgggattacaggtgtgagccaccgtgcctggcctaatatttgtattttttaaatagagacagtatttcaccatgttggccagtctggtctcagactcttgacctcaagttatctgcccacctcggcctcccaaaatgctgggattacagacatgagctaccaagcctcacacaactctcagtctactcattgataatgaaaacattgactggtgactatcacagtgatggacgtgaccaccacatatttctgttaagtgtctcatcttatatttttaatatatattttagtatcattctgtgctcattgaatatcaaacactcttctaatgtgaataaacctgaaagaaggaattttcttgtgaggccatttctgctgtctattttaagctagttatatatctcatttagaccatcaattgctcaactaatattggttgaatatgcaatttatgccagattctgttccaggtacagaaaacaaatcagtcatggtctgtgtcttcatggagattacagtctatcatgaagatgaacagtaagcaaaggttaagtacaggtgcagtgggtgctgcaaaggtgacgtgcaggatgcaattggcagggctggatccagggtgaagtgagaagtgcaacaggtacttaaagggtgacatttaaggaggcatttgcatgagcctgagagtgagtgcctctttatgtgtcacaccctagacacctcctgctcctcaccctagtcttggccctggctatcagaaaagcgaaggtggggtggaaaatattctgctgtaatatttggggtaacattctctgacagttgtcatttactgcatctttggacactcagtatctgagctcctttccattagggaagctagtctctatttttgtggtcttggtggaaaggaaggctgaccttcaactacagaatatcttaaaggcaaagattctcttttgccaccttgggagttagcagacaggtgcatgacccaggctcagccaactgggtgctccaacaagggacttgaatcttaaagggctaaagccaaaccacaaggaaggtggaggaaatacacagtggcagcagcaatggcaagagtccaggtgtgatactgatgcacagtgctctggcagcaatgctcatggtaagatcttggcaggctatttctgctgcccactccgtctcagtctttccaagcctgattgtccagacttctggtcaattttatgagctacatgttatccttccaagaaattatcctgtttgcttaaattgctctctaatgaactcttacattacatccaataataaatgtaaggtgtttcatcttcaaatatgttgagggaatgttgctatattcagtaaggaactcttgtgagattgggtgtcagaacgtgggacaatctgacctggcagagagattagagggacagcagcaaaactcagggtggaaggcctcaatatgggaaagaggagggagactgctaatgagggactgagctgagatagcagtcccaaaaagagtaaggagagtaaggtttgcaccaaaacatcacagaggaagaatcaaggggcttcgatggctgacttgatgtgagaagtcaagaaatgaacatacaaagtcagtctcaagacagcatagagctgccatcagattatttttttttctttctttctttcttttttttttttttttttttttttgagatggagtctcgctctgttttccgggctagagtgcagtggcgtgacctcagctcactgcaacctccgcctcctgggttcacatgattctcctgcctcagcctcctgagtagctaggactacgagtggccaccaccacacccggctatttttttgtatttttactagagacgggatttcaccatgttggccaggctggtctcaaactcctgaccttaagtgatccacctgcctcagcctcccaaagtgcagggattacaggtgtgagccacagcatccggcctgccttcagattcttgaatgactgcctgtacacagacagatctttgtggactcaaaatatagaacaaaggcttcatgtaaatgtaaccagaatttagataactccagtttgggcacaaacagtattttctacccctcccttcccacccacttcccattgctagatgtgttctataatgtactcaaacccctgaatgctcagattgagtcctttcttcttgaatctaatgttcatcagaacctcagaaagaagcgcttgaatatcttagacttcccccttctgtaaggtcccttaaactcatgctgtgccacttctcagaacatccacatcaaggaaagaggagttttcctaaatcatggagagtaaaacatgggtggaaaaagaaggcttgagtttcaggcaatggtaaaacacaagaacttgaaaaggaaaacctgtttgagtgggaaagtgaccatccttggagtttaactattcatataggtagcaaatacttattgtgttctgatagtgtgccaggcaccatggaatggtgagcaaaaccaacagggtccctgcgatcataaaacccaaattctcctggaagagagacaagaaacaagtaaatgaacaaaataattactgatttttgagaagtgctaggacatacatttgcctagtgatataaaggacttcattagatataatagtcaagaatgacatttaaattaaggcctggaggatgggacaaaaacagtcatataaacatcagaggcagagccttcttgggaagagggaacagcatgtagcaaggccctgagacaacaaaagagcttgttgacatcaaggaacagaaaggaaacctgggtgacctgagtataaggaggaggccagagaggtgaacaaggcctggtagggcagggcctcccagtccatgacaaggagtctggatgttatctggatgttattcttaatgaaatggaaagctattgtttggtgcaaaacagagtagtgacaggatatcctttacctttctggatttaggactagatctgaaaaaaatgaaaataatttaccatttggctgctatgtggaaaattaattacagaaaacaggagactattgtaaaagatcaggtgaagatagcagtggcctgaactagatggagagaaatggataattttgatatgtgttttgaaggtagagccacaggacttgctgagaaattgaatgcagggaggtgaagtgaggaatcacacatgacttgtaggtttggtgcatctgggcacatgttgttaccatttcctaagaagggaaataacagggtactaacagtgcctagtgaggtgaggtccccattaggagttccattctgatatgttaggtgaccagatggagatgtcatttaagggggaagatataccagtttagacactagagaaagtttagggtaggagctatgaatttgagagtgatcagcatatagagggtagtcaaagtacctagtgaaaaagagcagagagaaaagacaaaaggagcctagaaacaagtccctggcctttggaaagggaaggaggagccaggagagaagactgaaaatgaatggccgaggtgatcagaggaaaaccaggggagtctgccatcttagaaggcaagagaagaaagcatttcaatgaggatgtcgtggcctcaatgtcaaacacctcttcagaggtcaataagaggaaaacaggggtgcctctgttgggtttggcaacactggagatagttggtaatctttactagaaaaggttcagaggcacagtcaaagccaaattgaactgagttgaaaggtgaatgagaaaaaagggataaagtgaaggcaggcaacattttgagaagtatttgtttaagcactgcaaataaacgaggcatcgtccagagaggaatgtgggactcagggatctttttttttttttaatctgggaggtactcgaacatctttgtatgatagaaatgatctggcagagaaggggagaataaggagaataaatgaatatgaagttattgagtaggggagaggagacaaatgtgaacaagtaagggggccagtttctcaggtgtagacatcattcttccactgaaaacaaaaggaagacaggagctgtaggacccaataccggagtgtgtagacttagtagagagaagatgaaggagttgcttctgatggcttctattttcttgaaatatgaggcaagaagtgatattttggtggggacagggaatggtagaagattgaggagaaaggaaaaatcatggactagtcatttcaaagaatgagaaatcaagcttcttagggaaaaacaggagattagctgggcagtgttgagtggtctttgaggttggaggccgtgaatttccagtgaaatcagtgagactagttggattattttttctaagaacaatcagctgctgacctatataggtcaggcacagtggcttacgcctgtaatcccaacccttagggagaccaaggcaggaggatgatcacttaaggccaggagttcaagaccagcctgggcaacatagcaagacccccatctctattaaaaaaaaattttttttaactgccaagagtggtagcacacacctgtagtcccagctacttgggaagctgaggcaggataatcccttgaatccaggagtttaaggctgtaatgagctatgatcacactactgcactccagcctgggtaacagagtaagatcttgtcttgaaaaataaagtttacctatagagaaagcaagtaggtggttgtattctaccatggttgggagtttggcattgatacaatgcagagtagagcaagggagctaagtctgcaagagaaacattacagggctagactggacggaaattgagtcgggagggtaagaaaattagtgaaaaaatggtagggtatagagctttacttcaactttaagagttattaactctgagaagtaggagttggtggcaacgtagtgaaggaggatttaactttttccaggcaaaaaattgctacgcagagcctagaagtagcaaattacaaaatgagatctacctagattctacttacatttatcaagaactgaatgtgggctagattctgtgctgggcactttcctgtctgttatctcatttaattctcatgacatccctatgacttgagtaggaaagttccccattttagagacaagaaaatagagcagagagggttaaatggcttgcctagggtcatgcagctgacatgcgattaagcaaagatttgactccagatcttctgatcctgcttcgaacgctcttccctagacagcttgatgatacttagacactgactctgaggctgaagtttgtcatcaggaaggtgaactggggacatagggctgaagccaggtcaggactccagtatgaaagggctgaataggaggcaggtgactccaaatagaacttttcaactcaggataaagaatcaagttcttttacattagtcagataagtagcaagagttggggatacttgggatcatggggctgaatgtggtaaaattcctgtcgtctcagttcaggatctgtcctgcaaaatgattagccagcagtttaatgtcccatggccacaactagagggaatggaaagagatggagcaaggatccacagatggcctgatgccagcactgtccaccatgaggaagactcacaagaggcattgccctagagcccctgaggggcagaactgcaggtgtgatcaagggaaagttataacctttggtgtgggagtagaaagaggccatgggccaagaatgggttcttgtgttcatcatacttgcctcctggactcccctaaaatactcatagattgagacccacagcatgcctcagcctagactctaaagccattgctatacaatacaatcaccactagccacatttagctatataaatttaaagctcgattgaatcaaattaaaacttcgggtccgcattcacactgggcacatttcaagtgctcagtagccacatgtggctagtagctaccatattgaacaacatagacaggaaatatttccatcatggcagaatgttctattggcagtgctggtctagaagaaaacaggaatcaagtagatataatgaatattctttaattcatgccctcttggaccagctatgggtcagcaggctaggagctatttgcaaggtttagattgttaccacctactggtccatcctgttcttcctaacatgcacaccggacacacacacacacacacacacacacacgcacacaacctttcttctttatttacttgtttctaaatgtaactaggtggaactatcagacagaaacagggtgttgccaagaatgatttaatagaactgcaggatcccatgatgttgagactcaaggttggaagagaggtgtcagactgcagaagttgattccaggcttgtatttgtgtctgttaattttggttttacaggtacatacttgggatccacacagcacttagcctcagttttgcataatatatagtatacttcactttctttacatgttgttctgcacctgcctgacttgccccaacatttcatgactgaaaacaaaagggaagaagagaatagagtcagttttgaaagaaagcagaaaggtgtgaaaggaagaggctaaagcccagtagaggagtaggagggaaatgaggaggtctgtggggaagaagctcttacacaggatcccctaagtttaagggagattatagaccactacgctttcttccttcacttgtgccccctgttagaacccccagagtccccccaactcagtggcataggacctactggatagcttcccctccttggccagctccttgggagggggaagaggacccctctcccaagggttttatctcccccatattataatgtacccaggtgcccagtagcaattagccaccttttctcattgttctttggtaccccctctgaccatatcaatgaaaggtgacaggaatattaaataaactcatttaacatctgtaagtcttctagggcacctttaaaactcccaagaatatcatactgccttcttcacaacatcctgggacttttctctggccccaaccagtcaagggaattaggaacagctattccagggaacctacaacctaaggtaacccagatgatttgaggttgcattaaaaagtggaatcagaatcctcaaacaatcagaaatttgagaaccattttcctagaggcaacaatgcatcaaaattcaaatcctttcaatgaatgtttttgaaaaagtccccattttctctatactccatacccaagtctctctctttacaccctatcccatcctcaggtcatcacgttcagcttttccagagctaaccagagataaggttggaatggtcaagtactgggcactgggaagaccatttggtaccagagaactcaaacttccccataactagagagactacctaaaggcctcaatgagctctaccaggccattctcccagcccaacctgtcagagtccccagagttctctgaacatgcatcaggtttcctgactcccatccccttctggagatcctgtttacctggggtgacctgggccaggagcagagtaacagtcaaaagcagaagaaggagcttcatgaatgatgaatgatcagggagggataggaggcttctcaactggtaaaacagacagaggactccattctgggcagtccagactggtatttattgccttgaggagcatggcagagccaagatcagtgaaccagaacgggaacagtcatttgagatcagacaggcaggcaaggaaggtatcaaccacactgcctgaggaggctgggagagggggaagggacgttaacaaagagaagatacggccttgcctctgaagaattttataatacagctggagaaccaagaaggggaaaaatattttcatctctaatttgtttttcattaatgagaaaaaaagagagagaaaaagagataagacagaaaaggagtgatacttctctgcgccttgggttcttcccagcaacaaggacatcttaggatgtcccatatgttgatgattcattataataccaaatgaagggcagagcaggggaaaataccttaatagctccatggccatcaccactggaaaccagaatgtcagtattcatggagtggaatgagcaggaaagccatagcccttacttttaacagtacatatttaataggaacaagtagcaccctcataggtagcaaaagaaaagccatttattattgttgtggtcttttttttattattacttatttttttgagacagtcttgttctgtcacccaggctggagtgcagtggcacaatcatagctcactggaacctcgaattcctggtctcaagcaattctcctgctttggcctcccaaagtgctaggattaaaggcatgagccatcatgcccagcttggtctttcttataagaaatggtagattgccccagcaacttgggaggccgaggcaggcggatcacaagttcaggagatcgagaccatcctggctaactcagtgaaaccccgtctctacaaaaaaaaatacaaaaaattagccgggcgtggtggctggccactgtagtcccagctattcaggaggctgaagcaggagactagcttgaatccgggaggcggaggttgcagtgagccgagattgtgccactgcactccagcctgggcaacagagcgagactctgtctcaaaaaagaaagaaagaaatggtagattgtaatcttggccctacttcttcatccctacttgaattcacacatttgccaaggtctcatcctaggagaactctatttcattttcccttcactttggccttggcatgtgatttgctttggctagtgatatgtgggcagaagtgacggtgtgccggttgtaagcctaggttttaagagatgatgaatattttcatttgcccttctgtgtctctgccatcactatgagaagaacatgccccagtggtccaaggaggatgagagatacgtggggcacagctactccaggcgactcacagatctacagtgagaaacagagctgccccaggcattccagcctcaagcagggcaatctagccaaatataaaggattgatgttttaagccactgagttttggagtggaacattacatagtaatggctaacttatacacaaggccagcagatagatcaggaaagagccaagtgctttttaggacaataatggtaaggtctatctttcttttctttttcttttttctttaagacagagtcttgctctgttgcccaggctggagtgccgtggcaccatctcagctcattgcaacctctgccccccgggttcaagcagttctcctgccttagccccccgagtagctaggactacaggcacgcgccaccacacccagctaatttttgtatttttggtagagacgaggtttcaccatgttggccatggcttgtctcaaactcctgacctcaggtgatccacccgcctcagcctcccaaagtgctgggattacaggcgtgagccactgcacctggcctaggtctatcatttcaaaatggacagaaataaagacatactaataagaggaatatcttctttctaacatggaagaaaacaacaagccaggagcagaggctcctgcctgtaatccccacaattcgggaggctaaggcaggaggattgcttgaagccaagagtttgaaaccagcctcagcaacataacgagactccatctctacacacacacaaaaaaagttttaaatagccgggcatggtggggcaaagctgtagtcctacctactagggaggctgaggcaggaaaatcatttgagcccaggaggtcgaagctacaatgagctaaaattgcaccactgcactccagccagctcaacagagaccctgtctccaaaaacaaaaaaaagacaagataaattttcttgttgtctgaagaaaaattaatgctccggaggtcactttttctataaagcccagatggtaaatactttaggatttgccagccacaactatcacaactactcaactctacagctataggacaaaattacccacagacaatatataagcaaatgagtgtggctgtattccaataaaacttatttatagacactcaagtttaaattttgtataattttcacatctctaaatgaaatttgattgttttcaacgatttaaaaatgtactggctgggcatggtggctcacgcctgtaattccagcactttgggagactgagacaggtgaatcacctgaagccaggaattcgagaccagcctggccaacatggtgaaacctcgtctctactaaaaatacaaaaattagccatgtggggtggtgagcaactgtaaccccagctactcgggaggttgaggcaggagaattgtttgaacctgggaggcagaggttgcagtgagccgagatggtgccattgcactccagcctgaacaacaggagtgaaactacatctcaaaaaaaaaaaatgtaccaaggcaaacagatcacttgaggccaggagtttgagaccagcctggatgacatagcaaggtcccttctctattttaaaaaaacttgttaaaaaaataaaataaacaaaattattgctgattttcttggtatctccactttggaaaaacagtttaacagtttcttataaagttaaacataaacttatcatacaaccaaacaactcctctctttggtatttatcaaagataaatgaagacatatgtccacgtcaaaacttgaattgtcatagtaactttattcaccataagtgaaaacaacccaaaagtccattaattagtaaacagataaattctgatatctccatgtaatagaatactattcagcaacaaagaattaaccactgctatgcaacatacggatgaacctaaagagcaagctgggtgtggtggttcacgcctgtaatcccagcactttgagaggccaaggtgggtggatcatctgaggtcaggagttcgagactagcctggccaacatggtgaaaccctgtctctaccaaaaataacaaaattagccagacatggtggcgggtgcctgtaatcccagctacttggtaggctgaggcaggagaattgcttgaacccgggaggcggaggttgcagtgaacctgagccaagatcatgccactgcactccagcctggacaacaagagcgaaacactgtctcaaaagaataataataaaaataataataaacattttttaaaagcattagcctgagtggaaaaatccagaccaaagaagaacatactgaacaagcttattcacatgaaactctagaaaacacaaacctaatctacagtgacaaaaaacagatcagtggttgcctggggctgatgggaggaagtgggcattgactgagatggggcatgagggaactttcagagtgatgaaaatgttctatatgcagatgtcaaaattcatcaaaatttacacattatgttttatataaattatacctcaaaaaagttgactttaaaaaaaacctgtgcaaatagtttttaaaataagcaacagaatccgataaataacataaaaccacttaaaatatatacacatttaatgtggtacacatataccatggaatactatgcagccatcaaaaagaaggaaatcacatcctttgcagcaacatggatgcagctggaggtcattatcctaagccaactgatgcagaaacagaaaaccaaataccacatgtcctcacttacaagttggagacaaaccttgggtacatgtgaacataaagaggggaaccatagacactggggactactagagtcaggagagagggagggaggcaagggctgaaaaactacctattatatactatgctcactacctgggtgacaagatacatcataggagttaaacatcataggagttgcctatgtgagagatggataggagttgattatggggataaaagttaataaatcagtaaaataaaataagagaagggctttgtataaggccaatgacaataaatctgccataaatacataaccctctgcaacagaggactaaaataaagtgctatattgacaaggggcttacttctaaagatcattagtaaggtatcagccccgtggactggaacccatttcctctccttccagaagggactgcagagaggaaacctgagatgccattcaagcaaacggcacaacttcctccactcttgagaaaggggattgtttctggttagaagggtaggatactgggctgagagccttgaaaaatgagagagagagagagagagagagagagagagaaagagagcaactcatgggagcaccatccttgcagaagtcttagtctagaaggtactttctttatgcatccaaggaacccccagtggcacagagtttcatctacactgaatggttttgagatctacttcccttctttaaagaactccatcatagccctgcaagtttgctcttgtgaacactgataagcagaataaggctgcctaataaagggatgacctgaatccattatgtgcatgatttatcggaattaatagtagttttcagcagtagagaagactctcataaaagacccttttcctatctgtcacaaaaaactgtgaaacaaaatgccttgattgcttcgtgagctaaaaaggacttcccacagctgaactatatacatctacagttctggagtgtccaccattcttagattctgcttaagattccacatcttaacttctactgatatccaaccatgttgccaagactcccatttcaagctctccaaggaaataatctgattggctgaacataatcttattcattatctaatagagataaaccattttaaaaggatagaaaactgtggaacaacctcccttactgatatctgcacatttcagcttttctttgttgccacacatgaagtcatatcatatgctctcaatagatggggtgaatgcctttcagtgaaaaaagaaaagtaaaaaagaatgtatgaacgcagagcaaaaaaaaaaaagaaagcgataaagatctgaggagcgaatatgtgttttccaaagattacagaactacaaatgaatctgcaaatggtacattaggaaaattatctgaggatgaagaaaggtaggaggcactcagtagagaaaggttggtactgatgagtggacggtgctgtgaagtgtccaggagcctggagtccacatattaaaggtgtacgcagttacctggacctaagtccaattcagtgtactcaacccctttaagtaggtttctgcagtgctgtggtccttaattcaacatcattcccctcttcttgagcctcaagtgggtaccactgccatctctggcttagtagaagatagggtggtatctgaaattcagaaaactcagaacctgttccctgcctggccattgactcttgctttggcccataagtcataagtgaccctaactgaagagtttgcccagcatccttctactcccttctcagatttcttccacccacttctggttagttccttgctctcagcactgcagcagggaaaggaaatatatctacatatcacttctttgtaatctttggggataggaagcattggagggtagtgggcaaagaagatgaaacttcaggcccaaataaggcttggaaattttctggagttctattatattccaactctctggttcctggtgctatgtgtaactagtaatggtaatggatatgttgggcttttttctttgatttatttgaagtgacgtttgacaatctatcactaggggtaatgtggggaaatggaaagaatacaagatttggagccagacaaatctgggttcaaatcctcactttgccacatattagccatgtgactttgaacaagttagttaatctctctgaacttcagtttaattatctctaatatggagatgatactactgacagcagaggtttgctgtgaagattaaattaggtgatgcttgtaaagctcagggaatagtgcctggcatagaggaaagcctctgacaactggtagttactgttatttactatgaatcctcaccttccttgacttcttgaaacatttggctattgacctctttcctccttgaggctcttctggcttttcattgtcaacacagtcaacgctcaatacaagggacattaggattggcagtagctcagagatctctctgctcaccgtgatcttcaagtttgaaaattgcatctcaaatctaagacccagagggctcacccagagtcgaggctcaaggacagctctcctttgtgtccagagtgtatacgatgtaactctgttcgggcactggtgaaagataacagaggaaatgcctggctttttatcagaacatgtttccaagcttatcccttttcccagctctccttgtccctcccaagatctcttcactggcctcttatctttactgttaccaaatctttccagaagctgctctttccctcaattgttcatttgtcttcttgtccaggaatgaaccactgctctcttcttgtcagatcagcttctcatccctcctcaagggcctttaactactccacatccaaagctacccaggccattttaagtttcctgtggactaaggacaaaggtgcggggagatgaggccagaaatgttcaagagggtttctgtccctaacatgcttaccgcttattgaggaaaatgggaaacaagtatttttaaatgagcttcatatccctcaaaagcacacacaagaaatgttttctaaataaatcaaatcttgattaagtaccttttacatacagagcactctcctgagcaccaggaattcagagcagtaaggatactgtcctctaacagccagctctgttaggataaaccagggtatgccacagtaaccaaaaaaagaagaatcttggtggcttctaagaacagaggtctgtttgtctatttcccatacatgctgcatatccactgaaggctggctggggacactgccccatatctcagtgtggaacccaagctgactgagtagccactcatttggtgctgatcaccatggcagaggaaaagagagctctagagagtcttcaactagccattatatgccctggccttggaagtaaaatgtaaccacctcataactccactggctacgacagtgacatggctccatccaaccacaagagggccaaaagtacaatcctacaatgggcttagaatgcagaaagccagaattatccaaacaacaaaagacaattgtgggcaaggctgtggagaaaatggaacccttgcacacgctgggtgggaatgtaaaatggtgtggccactatggaaaacggtatggaggttcttcaaaaaatgaaagataggcggggtaaggtggctcacgcctgtaattccagcactttgggaggctgaggcaggcagattacctgaggtcaggagttcgagaccagcctgaccaatatggagaaaccctgcctcaactaaaaatacaaaattaactggccgtggtggcacatgcctgtaatcccagctactcaggaggctgaggcaggagaattgcttgaacctgggaggcagaggttgcagtgagctgagatcatgccattgccctccagcctgggcaataagagtgaaactccatcaaaaggaagaaagaaagaaagaaggaaagagagaaaggaaggaagaaaggaaggaaggggaaggggaggaaaggaaggaaaggaaggcaaaggaaggaaaggaaggaaagaaagagattatatgacccagccattccatttctggatatatatccaaataaactgaatcagtatcttgaagagatatctgcacacccacgttcattggcattattgaccatagccaagatatggaaacaagctaaatgtccatcaacaaatgaatggataaagaaaatgtggtgtatacacacagcagaatactagtcagcctttaaaaataagggaattctgcaacatgtgatgacgtgaatgagccttgagggcgttatgctaagtgaaataaaccagtcacggaaagacaaatgctgaattattccagttatacgaagtgtctaaaacagtcaaacttatatcaacaaagagtggcatgatgattgtcaggagctggggagtgagggaaattaggaattactaatcaatgagcagaaagtttctgttaagcaagatgaataaattatagaggccaggcgcagtagctcacgcctgtagtcccagcactttgggaggctgaggcaggaggatcccttgagcccaggagttcaagaccagcctaagcaacatagcgagaccttgtctctattaaaaataaaaaattagctgggcatggtggcatgcacctatagtcccagctactcagggacagtggggaggtggtgctgagatgggagaggatctcttgagcctaaaaggtggaggctgcagtgagccgtgcttgtgccactgcactccagcctgggtgacagagtcagaccctgtctcaaaaaatttaaaaaaatgtttaaagttttagaaatctgctgtactacattgtacctagagtcaataataatgtgttgaacacaaaaaattgttaaaacagatctcaacatgttgtgttcttaccacaataaaataaaatctttgaaaaacttagaaagccagaatatttgatgtacagtccttttttttttttttctgttggagacagagtctcgctctatcccccaggctggagtggagtggtacgatctcggctcactgtaacgtccgcctcccagattcaagcgattctcatgcctcagcctcccaagtaggtgggatcacaggcaccagccaccatgcctggctaatttttctatttttattagagacagggtttcaccatgttggccaggctggtctcaaactcttgacctcaggtgatccgctagcctcggcctcccaaagtactgggattacaggagtgagctaccatgccggcgatgaacactcttactgactaccaaatatatcatcacagtggtcaggcagaatgtccacatacataaaaatactgcaaagtaggctgtctaatcaaaataaatatatatatattacagtagaacggagcatgggaacaaccacccaagggccagggcattcagggaggggttcatggaggaccttctccttctccaaggcttgaaggagaataggtttcagagaaatggtggagaaggagagggtgtaaaagagtacttcaggcaagggagcagtgtgaactgaggagtggtggcaggaacatttgcaagccatctggaaataatgaagatactgcctggctgcagctgccagctcctgcaccatataatgtgggaaaactgcataaaaatgagatttttatagtctttgaatgcaaatgtaaaatacttagacttggttctcaggtcaaaatcagggaactgagggaggttgaaaaggcagagatctgcgcccttcttcccacttttttgtttgtttgtttgtttgtttttagacagagtcttactctgtcacacaggctggagttcagtggcacgatctcggctcactgcaatctccacctctggggttcaagcaattctcctgcctcagtctcccaagtagctgggactacaggtgtgcgccaccacgcccagttaatttttgtatttttagtagagatggggttccaccatgttagccaggctggtctcaaactcctgacctcaagtgatttgcccgctttggcctcccaaagtgctgagattacaggcataagccacggcgcctggccttcttcgcactttaaactgagcagctctactttgatctgtttgatatattgagtttcatgtaagtttttggttttaaaaagttttctgctcctttaaaaataatatttgaaaaaccttagttttggaaatacagagccattttttctttaagtttgtgagtgtagagtctcagaattcagaccttagaagttgttgcatctgccacgtatcaaaagcaagaacaccctctaaacaacccttgccttctctcttaaagctcttccagcaatggaaaaatcaatacatgtcaagataatgcattccatcactggacgcctctaatttttaggagattatatcaattaagccagaatttacctttctgtaacatctacctattattcctaattctgacctttaacagttccagagaataagtccaaaaacaattccacgttaagcgcttgaagacaactatcatgggtctatttggtcttttttttcctaggcttattatcccaagtttcctctccctataaagtagaacagtatattctcttatactggtgaggcctctcagtatactctgtttatctgagtcctctccctttcttaaagcagggagactgatctcaagcaaaaaccttaaaaggggtgttttaagacggataaggcccagtagcttgtctatataggcctcccttcacattagaaaagaaagaaggccgggcgcaatggctcacatctataatcccagcactttgggaggccgaagcaggcagatcacttgaggtcaggagttcaagaccagcctggcaacatggtgaaaccccgtctgtactaacaatacaaaaattagccaggtgtggtgatgtgtgcctgtaatctcaggtacttgggaggctgaggcagaagaattgcttgaacctggtaggtgaaggttgcagtgagtggaggtcacacccctgcactccagcctggacaacacagccagaccctgtctcaaaaagaaagaaagaagaaaaaccagtaatgataaaaacttagaaattaaaagtacaaagatgaaatttccagaaattataacaaaatgacagagataaaataaaagcagtagagaaaatataagaaaaccagcaaatcaatcaaggagtccaacatatgaaaaataagtagaccagaaacagggaacaggaaaaacaaagaccaggaaattatcaaagaaataagtaaaggaagattgtcctaaaattgaaagacatgagtttgcagattgacagggcccaccgagtgctcagaaaaattgatttcagtaatcccacacgaaatttagggacaatggttgggcacagtggctcacatctgtaatcccagcactttggcagaccgaggcaggccaatcacctgaggtcaggagtttgagaccagcctggccaacatggtgaaaccccgtctctactaaaaatacaaaaattagccaggcatggtggtgggcgcctgtaatcccagctactcaggaggttgaggcaggagaattgcttgaacccaggagaaggaggttgcagtgagccgagattgtgccattgcacttcagcctgggcgacaagagcaaaactccatttcgaaaaaagggaaaaaggccgggcgcggtggctcacgcctgtaatcccagcactttgggaggccgaggcgggcggatcacgaggtcaggagatcgagaccatcccggctaaaacggtgaaaccccgtctctactaaaaatacaaaaaattagccgggcgtagtggcgggcgcctgtagtcccagctacttgggaggctgaggcaggagaatggcgtgaacccgggaggcggagcttgcagtgagccgaggtcccgccactgcactccagcctgggcgacagagcgagactccgtctcaaaaaaaaaaaaaaaaaaaaaaagaaaaaagggaaaaaagaaatttaggcacatcaacatgaaacgtcaaaatcctagagagaagaccttaagagctttcagagagaaataacaagtcacagacaaagagaagaacccgaatggcttcggatttctccacagtaaagaggtaggaggcaggactcaactctagatagaaaactggctgaaacagggaagaggcaccaaaatcaccttttcataagactcgcccaccaatgtcgtgacagtttaccattgccatggcaacacccggaagttaccaccccttttctaaaaatttctaaaaaacccttcccttaattttcgtggaattaaaaatggatataaatatgactacagaagtgcccctgagctgctactctcaacacactgcctgtggggtggccctgttctgcaggagcctacaaggagctgtaacactgccaccgcctccataaagctggtttcttctaccaccgctcactcttgaattccttcgtaagaatttgcccagcatgggtaacactagatattggaaagaacaatgaggcaatgccttcgaaagtctagagtaaaataatttccaatatggagtgaccaaccaaaccactaaccaagtataaggatagtacattgaagtcagacattttcaggaagctatcaggaggtgctctgtccaaataagagtaaatcaagaaagatctaggatccagaaagcaagacattgatctcaggagaaagtcaaaaagaatccacaggatgatacaaacagagatccaggataatatcaggtcaccaggtgtaatgtcaaccagttcagagtgaagcaggtctgaatgcccaaggagagaagtctccaggaagacaaaattgataaaatacctaaaggttctgaacatattcaaaggatatggcagacagctaaatcctcattttccatagcagaaatccaatggaaagtgcctaaaactaaaaaattaagaagtaaccatataagcatattagtaaataatgacggaagagatggaagtgaaatccaaaggaaaaaaacaaaagatgtgaaagtagttttttgaaaagcaggaaatgaggaaagagagacagatgactcctatattttattatagtcttatattatactattatatactattatagtctcttattcaaagttgatttttaaaactatgtagatgtatggttttgataaacatttaaactaaatatgaaaattaaaataacaaatatagagagaaagcaatggataagaattagacctgtggataaatttaattttcctgcttaactgttcaacttgtcaaaggaaggacttggtgggaggtgattggattataggggcagtttcccccatgccgttcttgtgatagtgagttcgcacaagatctgatggtttttgaaagtgtttggcagttccccctggtgccctctctctcacctgctgccgtggaagatgtgccttgcttcctcttcatcttctgccctgattataagtttcctgaggcctccccagccatgcagaactgtgagtcaattaaacctcttctgtttataaattaccgagtatcgggtatttctttatagcacagtgagaacagataaatgcatgggtagatagccaaaggaaatgaattcagtatgttgaagagatacctgcactcccatgctcattgcagcattattcatactagccaagatatggagttaacctaaatgtctgtttatggatggatggataaagaaaatctagtatattatacaaggaagtattattcagccataaaaaagaagaaaatcctgccatttatgacaacacatatgaacgtggaggatattatcttaagggaaataagccaattaccaaacgacaaataccgcatgatctcacttagatgtggaatctaaaaacgttgaatttgcagacacagagaataaaatggtggtttccaggggctgagagatgtgggaaatggggagaagttggtcaaaggatacaaactttccattataagaagagtaagtgctggagatcaactgttacgcatggtaattttctgggatcatttgtgctgccataacaaaatacctgaggcttaatgacttataaagaagagaaatttatctctcacaattctggagactgggaagtccaagatcacggtttgtgagggcctagtttctctggttccaagatggttccttgttgctgcatctcccagagggtaggaatgctgtgtcctcacatgggggaagggacacatggggtgaaaaggggtaaactccttctgtcaagcccttttataaggtcgtctaatccctttcatgagggtggagccctcctgacccaatcacctcctaaagatcatacctcttaatactgttgcattgggcattgtgtttcaacatgaattttggagggaacaaaaacgtccaaaccacagcagtgactacagttaacaatactatacggtatacttgagagttgccaagagagtagatcttaagtgtttcaacacattgttaaaaaaaaaattggtaaccatgtgaggtgatggatgtattaattaacttgactgtggtaatcatttcacaatgtatttgcatatcaaatcatcatgttgcataccttaaatatacataatttttatttgtcagttatacctcaataaagctgtaaaaaaaatttaaggaatagatgagatttcttttttcataaaaaaggaaaagctctgggtgtggcagctcctgcctataatcccagcacttcgggagactgaggcaggaggaaagcttgaggccagaagtttgagaccagcatgggcaacagagcaagacctcatctctacaaaaaaacaaaattatccaggtattagtcccagctactcgggaagctgagtcaggaggactgcttgagcccaggagttcaaggctgcagtgattcatgatcatgctactgcactccagcctgggtgagacagcgagactccatctctaaaacaaaaataaataaataaaaaggaaaattatccaaaatagctagcacatagtaggtccagtttcctctcatgtatatacaactttacccacaccttttctgcttgagtttgattaggtatactaagagacaaacacagaagtcagccaaagatgttttaataaagcccaggaatctactgacatcagacttaaggcaagtttatcttcatttttgtggcctcagactttaaagcactaattctttatatgctgtggtaaatgtggctggtccttgggcttcaaacagcacagtttaccactcacgcagaaaacatagaccctttcattcttcaggcattcgtcacggcaggagccacgaaaattccaacatgtttcaatcctgcctattacaaaaagaaaaaagaaaggagctgatatcagttatgaggggaaatgagtcctggactgagaagactaacagaggaccagacagaagaagggggctgtagaagaaggaggcattccctctaggtaactagggtggtggtattgtctatcaccatattgaaactcaggaaatatccagtgaaacccatgagccctttctaaagaatctactagaaaaagagctgtagacaagcaaatgagaggagcattgacacagaactaaatattaaatataaagatacttgtagaaccaaaatgaggattttaaaagaggtagtaaagtacataatggctatatgttctgacaatataaatagagtacaacataaaaatgagagaataatggtgagaacatatgcagacatcttaactagtttgagtaatcatgacattatggtagcattgatattattttactaagactattgtatatgtaatgagagatcaatcaaatgagtaagtcatgggatattctatcgtcccctgtgaccttgacaaccagaattctcagtatagaaaagaaaatactgatgtaatataaaagttgattctgaatttgagttctgaatttgaattgaaaatgccaatatgaactcacaagtattttatatttaaatagataaaataaatagatgattgatggatggatagatagattgaaatttttccagctctggtcactgagaaagtctagaaacaataactaactagtagaaattagtattcctagtacccatgctataatcttaaaatactatctcccagtaaactttttttaaaaaacaggacttcttggagatatggtggattccagttcttgggcagtaaattacaagatgatcttgaaacattctgtcgtaccagatactaagaaagcaccaaagattaatagggatatatctaaaagacatacgagccaaattaaagagactcctattggccaagaataagacaatgtatacttcaatagcgaaaataattgcaatagattgaactcattgcttagaatcatcagttcaaaataaataatatttaagaaaaactaatggcttaacctcagaggctgatagaaaactaattcattatctctcaaaccaattaagcaaagataaactcaagcatttatcctgtcttcctctctgaactctctaaaccccaaggtaaccaaacagatgagggaaaatgcctctttgataaggagttcagctaataaatgaaggttcttcccaacatatctgtacggctcacccctcacttccttcaagtcttcatttgaatgtcaccttctcagtgaggcattcccttgacacccctttttaagttgcaaattcacgtaccctgatacttgctatcccctgcttaccctgctcatttcctcccctaatagaatcataagctccaagaggatggagattttgtttggttggttggttagttggttgattcattgctctatctccagcacctgtgcctggcacacggaatccactcaacaatatttactgattgaacgagttatttaagcaatgacatgtccactatcccctaaatccagctgccatcctgagaagaagaagggggtgaggtgaaagtagaaatgctgaaagactgaacattttaaagcaaaatgagctaatctgagaggttcttttaaatcaaaaaagatgaatacaattgtcttctgaagttgtgtacatccctgtgccctttctaactcccacttttcctaccagcaggatgggagttcctggaaacattcaaatgaattacagaaaatttaaaaagctatatttgttgtacatcaaaatgtcagtgtcctcaatgttgatccttcaacctaatttattattttaaattgagaaaagaataaactgaaactcacaggcaccaagtagtttgctgggggcatcacagaacttgcaaatggtgaggcaggttctaaaccaggatctggggactctttcctcttcctccagacaattaatatttcacactgctccctgtcagcccatcctcccaggccctggtgtgccctgaccaagactcactgtctactcccagtccctcccctagagaggtctaggttatctggaatgacttggaggaagagcagcagcacagccaaagttaccaaaaaagtcttcatgacttcaagtagcccacagagtagtctcggctctggtgaagtggcaggaaatggaggcgagctcaggactctctgctgcctctaatcagctgggaagtgtgtcactcacacgtgccactatctgcccatgggtacagtttgctctgggacaacctgcctttttttttcatgctcagtcaccatcccaacacccctgcacccagagtgtggaccccacacccctgagctcgcacgcctccctttgtccaccatcatcttttagggaccagcaaaaataaatcatacaacacccagaaggatacttttaaaaatgtatgtcagcccttgttataatacagcttaaaaatcctccaagactccacaactagaaaaaaaaaatccacaatctttactatgccctgcaaagccctatattctctggtttagaaatccaccattatcatggttctaatgtaaatgaagcaagctccttttttcaaatgcaattcccagtttgagagcagaggagtaaagaagaaaggacgatcattcatattttagggagaatgtgtctattggattatttcctaagaaagaaagcccgagtacctaaaatcctcagtttcaggaagcattttggcatggagggtgagaaaagacaagctgaaatattcagcttgttgtcctggctgtgccagttagtggctgtgtgaccttgggagagtcacttcccttctctgggctttaatctcaccaatgagcagattggagcagatgggctgtagggattaactcaatcctcatatactatgattctttgggtgtgaaaaggcatggaaaatggaatgcctggaactctaggttttcagccccagcctaggcaacactcattgggtttacaccttaggattctcagggctgcccttatcagactccaattctctttacacactggggtcagaggcctcttcccctgatacctacacctgatatgctatatggtccctgcaaaacacagtccctctttgggcctgcttcttgtatagtcaaagcacaaaactttactctgattattataaaagcttaatattctccctagagcccttgaaggggtctcatcacagcaggctgttttggacatgagatccattagctactgatgaaagagcagggaagaccttgttctgtctgtgtacctctgggcacatgtcagacatcacaacctgttcatggtggaccaaaactccttagggccaaatctcatcaggaattaaaaacaacaacaacgaattaaagtgacatcaagctatatttttcacctatcaaattgacaagaagctctttttttataatgataatcccagagtttcataggatcaaggacctagtttctcaacaaatggctatccttgtcttttcacttttgcccagaatgcaatgtccagaacaaatggtaggggtcttctgtggtatcctgaacaggaagcctcaggataccataagaggagtctcaggagctatctcccatgtttgtggcaaaggccagcctacctatcagtgagtcctttgggtttattgtcatcttaggtgctacaggggttgtcacaccttcccccagttcatgtttggccactggcagattctacctttgacaacaccagcaccttcaactaggatgtggtggagacccagataaaggtactccagtctggatatgcttctggacaaagtgtagatggtccctcagtaccattcccatcggtagcccagaatctctccttccagttggtttcatagaatcttgatgctgtccagaccacagggatattcagccttaggggtttctgtgttgtccagagcatgataggggcctgctttgtagcatcactcaacattaactcttaatgtatcttttttcaatatttattcaagattttaaagatgcaacacaaatgccttctttccagtgacttaattggctgtagttgtagatggggttagatgggatgggacactcaatacattttgtttctttttcattgctcagaggtaaactcagtgtccaaaaagaggcaagagaatgcattaagaatttccttgcctaaatagcctatggtggatttttctttcctcagaaatggggaaagaacaagggtatagttgtttctatttgaacagaaacaacaacactcttgttcattgcatcatgaacatctaaagatatactaatgcctttgtcataataaattggttatcatgaagtgttagtttcctagcactgccataataaaagtacacttgtttttgtcaccttgaaaagatttgttcacttatattgacttcaattttttaaactgtaaattgcattttattagtagagcttgaaaggttcaaaaacgctctcccctctcccctctcccctctcccctctcccttttctcctctcccctctccctctcggtctccctctccctctctttccactgtctccctctgatgccgagccgaagctggactgtactgctgccatctcggctcactgcaacctccctgcctgattctcctgcctcagcctgccgagtgcctgcgattgcaggcgcgcgccaccacgcctgactggttttcgtacttttttggtggagacggggtttcgctgtgttggccgggctggtctccagctcctaaccgcgagtgatccgccagcctcggcctcccgaggtgccgggattgcagacggagtctggttcactcagtgctcaatggtgcccaggctggagtgcagtggcgtgatctcagctcgctacaacctccatctcccagccgcctgccttggcctcccaaagtgccgagattgcagcctctgcccggccgccaccccgtctgggaagtgaggagcgcctctgcctggccgcccatcgtctgggacgtgaggagcccctctgcctggctgcccagtctggaaagtgaggagcgtctctgccccgccgccatcccgtctaggaagtgaggagcgcctcttcccggcagccatcccatctgggaagtgaggagcgtctctgcccggccgcccatcgtctgagatgtggggagcgcctctgccccgccgccccatctgggatgtgaggagcgcctctgccaggccgcgaccccgtctgggaggtgaggagcgtctctgcccagccgccccgtctgagaagtgaggagaccctccgcccagcatccgccccatctgagaagtgaggagcccctccgcccggcagctgccccgtctgagaagtgaggagcccctctgcccggcagccgccccgtccgggagggaggtgggggggtcagccccccgcctggcgagccgccccgtccgggaggtgaggggcgcctctgcccagccgcccctactgggaagtgaggagcccctctgcctggccagccaccccatccgggagggaggtgggggaatcagccccccacccggccagccgccccgtccgggagggaggtgggggggtcagccccacgtccgggagggaggtgggggggggggtcagccgccctgtccgggagggaggtgggggggtcagccccccgcctggccagccgccctgtccgggagggaggtgggggggtcagccccacgtccgggagggaggtgggggggggtcagccccccgcccggccagccgccccatccgggagggaggtggggtcagccccccgcccggccagccgccccgtccgggaagtgaggggcgcctctgcccagccgcccctactgggaagtgaggagcccctctgccgggccagccaccccgtccgggagggaggtggggggctcagccccccgcccggccagccgccccgtccgggaggtgaggggcgtctctgcccggccgcccctactaggaagtgaggcgccccgctgcccggccagccgctccgtcagggagggaggtgggggggtcagccccctgcccggccagccgccccgtcccggaggtgaggggcgcctctgcccagccgcccctactgggaaatgaggagcccctctgcccggccaccaccccgtctgggaggtgtacccaacagctcattgagaaccggccgggatgacaatggcggttttgtggaatagaaaggggggaaaggtggggaaaagattgagaaatcggatggttgccgtgtctgtgtagaaagaaatagacatgggagacttttcattttgttctgtactaagataaattctgctgccttgggatcctgttgatcggtgaccttacccccaaccctgtgctctctgaaacatgtgctgtgtccactcagggttaaatggattaagggcggtgcaagatgtgctttgttaaacagatgcttgaaggcagcatgctcgttaagaatcatcaccactccctaatctcaagtacccagggacacaaacactgcggaaggccgcagggtcctctgcctaggaaaaccagagacctttgttcacttgtttatctgccgaccttccctccactattgtcctatgaccctgccaaatccccctctgcgagaaacacccaagaatgatcaataaaaaaaataaaaattaaaaaaaaagaaaggttcaaaaacatttacaaagggcataaaagtggtgggtttcaaaaaatattaatatctaatcatatatttcattatgttaaaaattcttacttacctttttctttcccagagagagtttaggaattttctcaggtgtgttttctgtaggtgatttcaaacagaattccaaggctcagcttttagaatgctacagaggaaaataatagggaaaatctcctttgattttggctgtagaaaatgaatacatttccacgaggaaatattgtagataattggtgagttacataaatttataaaacattagttcctctttctgcagggtaaattcctgagagtgaatatctctggtctgtatcctgttatcttgatttctgagtttcatactaaatttcatgagatgaaacttggtacctcctacaagtttttccctatgactaattgtttactacattatttttaatagaaataatacaataataaatttattatctgaaagaaaataaataaataaagtacacttgccataacaaactgagtggcttaaagtaataaaaattattttctctcacagttctggaggtcagaagtccaaaatcaaagtgttggcagtgttgcttcctctttagggcacagagggaaaatctgttccatgcttctctcctagtccatggtgattgctaaatgatcattggcttgtagtggcgtaactccaatctctgcctctgtggtcatacagcattctccctgtgtgtctctgtccaaatttctctttttttttttttcttttttttttttttgagacagggtctcactgtgttgcccaggctgtagtgcagtggtgagatgtcagctcactgcaacctccacctcccgagttcaaacaattctcctgtctcagcctcccaagtagctgggattacaggcacctaccaccacacccagctaatttttgtatttttagtagagatagggtttcacgctgttggccaggctggtctcagactcctgacctcaaatgatccaccagcctcggcctcccaaagtgcagggattacaggcatgagccactgcgcccagctgaaatttcttttttcttataaggacaccagccactggattagagctcacccttatccaacatgacttcatcttaacttcattacatctgcaaatatcctatttccagataagtcacattcacaggcacttggtgttaggactagaacatatattttgggaaagacacaattcaacccacgacaaattttttttaaattcttattatgagtgaaactgaacatcttttcatatgtttaacgcccttttttacctttttttgtggactgtctattcgtatttttgtctatattcaaataatttttagtaatatcttcctcctctttgtatttttttgttccctgtttctagaattcttattttccagatattgggctctctgcactgattctctaattttatgtattttctctcctgatttccatccatttggcttttttcctctagtttctcaaaaattttaatcaaatttgtcttccagcttttctattaatctttcttttccattttctgctattatattttttatttctaagagttcttatttattccctaacttttcctttttgtagtatcctattcttgtttcatggttgtagtagcatctctaatttctcgcgaggcttttaataatgttttcctgtctgcataatctatttcctataacttgtttgttggttggttggatggttgatctgttttacattagatgtttgcctctcatcaatgatcatatgactaatgattcttaattatgtacttatatataaaagtgtttcactgcaaagcttattagaaactcaatgaatgattttgttctgtttggttttggtatctaattttcataatagatactttaatggcaacatttgtggttcctttgtttgtttgtttgttttgttttgttttgctttgctttttaagacagtgtcgctctgtcacccaggctggagtgcagtggtgctcactgcaacctccttctcctgggttcaagtgattctcctgcctcagcctcttgagtagctgaaattataggtgtctgccattatgcccagctaatttttgtatatttagtagagacagggttttgccatggtggccagactggtctcaaactcctcacctcaagtaatctgctggcctcggcctcccaaaatgctggaattataggcatgagccactgcacctggctgatatttgttaatttttaagagtgagagactaaaatgctgattaagcacacgaacggggcttaccaattgtgacattgacagtgaggtgatttgactgggccatttagtggagaaatgccagtgtcagtttttttaggatcttttctgcttctctgctaatctcctgctgggaattctgagagctaagtggagaatgaagcctgggggctaaatagtttctcagcaaccaatatacatgcttcagctaatcctcccattttctgcttactaagtttatcttcagtgatgcttggaatccccaggttcagagagcctctgttttacccttgctacaaaagccgttaagtctttttttttttcaggattggggtagtatagtatgataggtatagagtgatggctgcctgcatgaaaaggagaaggaatagagtatctaaggattgattcttaaacactatttcaaccaaacctccttattttaactcttccacatttctccctgtttctagatgtttatggtgccactagattctgagctcttatttattttgtggtttaaattgggtcggtcctttgttttccccacttccagctttaattcagttttctttagactgcttactcatttccagctcatccagctgccttctatcttctaaattgttgtgtcctctatttcattctcctcatatttattggtttatgacttttaaaaaaatgttgctataattgctgtcgcttaagtggggttggggagcaaataactaaaaatatttgtattcaatccactatttttacccaaaagtcaatggtgtgcttttataaattgtatcttattttaatttgtgatgtttaaaaatgctattggccgggcacggtggctcacgcctgtaatcccagcactttgggaggccgaggcgggtggatcaccttaggtcaggagttcgagaccatcctggccaacatattgaaacctcatctctactaaaaatacaaaaattagccaggtgaggtggtggtgggcacctgtaatcccagctattcaggaggctgaggcaggagaatcacttgaacctgggaggcggaggttgcagtgagccaagatcacaccactgcactcaagcctaggcgacagagcgggactctgtctcgaaataaattaaattaaattaaatttaaatttaaagtgctattaatattgttttttatttttaaccagaaagtgttaatttggcaaattatattaactgattttctaattttaaatccaacttgcattcctaggataaacccaacttagtcacaaagtattgacatttttacattttctggacttgctgtgccagtgttccatctaagatttccacatctatgtttctaagtgagattggctttcctaattctgtactcttcaggttttacagtcaagttatgctggtctcataaaatgaatggggaaatactccttttcttttcttttttttaaagcattatttatacaaatgcattttattgttttaaacagaacaaaagaagaggcagaaaatatttgcatacaacaaatcctagcttataaatgtagttttttagcggtgatgtctctaatcaccattcagggatttttttttttttttttaatttgcttcactgtgtcttgagcactgatattggagaaaagcacatccggcaaaaagtgtatgccagtgtctcaaaccactggaagaactgggagagcaaacatgatttttcttaggggaaatactccttttcatcttctctggaaaaatttgtgtgaagtgaaatttttgttattattatttattatttgtcccacaaatgtttggtagaacttgtgggtaaactatctgggactgggactttcactcttgaccaagatggagtgactgggactatattgatcttcccacctgaaacaactaaacaatcaggcagaaaatataaatcgatactttctaaaacattagacattgaggaatggaggacagtgtttcttgagatatgataaataaacaatgtgggctctgtgattgccccaccttattgccttgaaagaaatttcagactataagacaggaagacaggaggcaggaaaagtcatgtttttgtgtttctttttttctcctttcttgatctcatatttgaattgtttttctcattccacttttcccttctgctattttaaaagttacgccttctatttatatagctaatggtatgtttttcaaaatctttttgaccatgacacaatatcttttacatagtgatcaagatatatatattatggtatatgtaatgacatagaaatcataatatgtgatatacatatattgaattattatcattgaattcaattattgattgattgaaccaaaagttctatgagacatgagttgcttttacagaaagcaatgtcttcttgtctattttatcctactctatcctgtttatcactttctaaaatgatttcttgactgtgatggagagactctaggagtctttccccttatccctgcctcctgttactcatgcatttgagatctccttcccttgagtgtaggtaggatctgtgacttgctgttaaccaacagaatacaggtggcaaaggtgatggaatggaatgtctggattacattgcataagattataatctatcttgctagaagtccctctcccttgctgactttgatgaagcaagtgaccacgttagggaggcacacatgacaagaaactgagaacactcccacaaacatctggcaaaaaactgagaccctgggtcttacaacctataatgacttgcaggctgccaacaaccacatgagcatagaaacgtatccttccccggccgggcgcagtggctcatgcctgtaatcctagcactttgggaggccaaggcgggcggatcatgaggtcaggagatcgagaccatcctggctaacacagtgaaacccagtctctactaaaaatacaaaaaatcagccgggcatggtggcgggcgcctgtagtcccagctactcgggaggctgaggcaggagaatggcgtgaacctgggaggcggagctttcagtgagcggagatcgtgccactgcactccagcctgggcgaagagtgagactccatctcaaaaaaaaggaaagaaaaaaaaaaaaaaagaaacatatccttccccagttgagcctcagatgagaggaaaataagagctggttctaaaatcaaaagctgttgttcatcctgaattgaattttcttagtttgggtggaacagagtcgttttgaagtcttgttctgatctagttctattgcattgttgatgataactgttgactttgtgtagtgtagaagcaacaagcatgtccttttagtacaagtacagtgaagggtagaacaaactttcattgatgcaaaaatttaaatagtcacgttacttctgtatccagtgtcttaaagttttaggattagttttagttttgtgtttgcttacatgagcttagcataaagaatattttaaacatctcgttttgtcttcaacattttttctattaagaggtaaaatgtaggccttgtttgactcttgacaatccagtgtatgtttgatcttagatctcatgacctgagtgcatctcttctccaggaaggaaactgcaccaatgtctgttcctgttaaatagcaatttttagggccgggagtggtggctcatgcctgtaatcccagcacttggggaggccgaggcaggaggatcacctgaggtcgggagttcgagaccagcctgaccaatatggagaaactctgtctctactaaaaatacaaaattagctgggtgtggtggcacatgcctgtaatcccagctactcaggagactgaggcaggagaatcgcttgaacctgggaggtggaggttgcagtgagccaagatggcaccatagcactccagcctgggcaacaagaacgaaactcccatctaaataaataaataaataaataaatagcaacttttagtctcagcttgttttgttttgatgtcaataaatagtaacagcattcaaaaaaaaaaaagagagagagagaaggcacggtgactcacgcctgtaaccctagcactttgcgaggctgaggcaggcagatcacctgaggaggtcagaagttcgacaccagcctggccaacatggcgaaaccccatctctactgaaaatacaaaaattagccaggcatcgtggcgcatgcctataatcacagctactcgggctgaggcaggagaatcgcttgaacccaggaggcagaggtttcagtgagccgagatggcaccactgcactccagactgggcgacagagtgacactccgtctcaaaaaaaaaggatttgggtatcatctaggtatgcgaattttgtctgcaagcccatgtgagggtttaattatatttacaagtccttcccccatctctattcagtgtcgagactcaagataggccattttctctatgattctctcaatggggcatgtattcttatttctaattcaccttcacactgatgtcatagccctttgaagcccaagatttacacagaggggtctccactaaaggttccccaatttagctttcttttctgcttgttgcatcacttaatgttataaaaaccaagtagtgtatgagttaagttgctataattttttaaaaatcaaaatacaatgacttaaataagaagaaagtatattttcttctcgcatgatggttcagaggtaagtagcccagggataatgagacagcttatcattctccacagataactttcatccctttttttaataagtggctactccagttttcttgattccccaaaacaatgggaaaggaaaaagaaatgtagggcaagcaggtaccttttgtaagaatatgaccaggaagccatacacatcactccagttcacatcccgctgttagaactgacttgcatggccacacctactggatcttacccagccatatggttctaaatacctctataccctgaaaactccaaaatttatattgatagcctgaagctcctctccaagtttttctgactcttaacatatctaacatgatacctccatttgaatgtctaacatgtctgaggtggttttaaaacataactgaaaatggccggatgtggtggctcacgcctgtaataccagcactttgggaggccgaggcagaaggatcacctgaggtcaggagttcgagaccagcccggcaaacatggtgagaccccgtctctactaaaaatacaaaaattgctgggcatggtgatgcatgcctgtaatcctagctactggggaggctgaggcaggagaattgcttcaatctgggaggcagaggttgcagtgagccgagattatgccactgtactccagcctgagagacagagagagagtctatttaaaaaaaaaaaaaaaagccataattgacaattatttgatatgcctccatcaagggaagaaatttccctctccttgaatccaggcatgcttgtgactactttgaccaatcgagttcagcagaagtgatgctttcaaggcttgatctaaaagggtcatacaatctcctgtttgtttgctgtaaccctcactcttggaccctgagatcccatgtaagaagtcctgctactctgcatgaagcccaagccacatggaaggatcatgtgggtgctttggttgacagccccagataaacccagccttcaggtgccacccatgagtgaaaaagcttccagatcccaccaccctaaacattcaagtcttctcaggtgaactctcaggtattgtcataagataatgctttctgtactatttctacatgtcagatttattaaatgattattatgatgttatagtttattaataataaacaattcatgtattgtcctaagccttttacatacattattccctgtgataattcagtgaaataggtaactttaagatctctttttactgatgaaaactttaagtccacagaggttaagcaatttatacaatgtcagaaagttcacaaatggaagatcaagcacttaacccaagtctgtcttgacttcaaagtttattcttcagaaccagcatctaataggggctctgtaaagtcaatatggagtgacaatttgtgacatcagaattagtggttaggaaaaactctcccaggagtttcctatttgagctaaaacatgagtgggaggaaggaaccagtcacaagaaaatcaggaagaatattgcacgcaaaggaaatagcaagcacaaatgtcctgaagtaggaacacgattcgtgcatttaaaggaaagaaggagagccagcgtggctgaagagtagtgggagaggagcaattgctatgagatgaggtcagagaagtatgcagcaaccagatcgtgcagaccagcagaaagagtaggaatgtatcctagtgcaaagatagccatcagataaatcaacatctaattcatatttttaaaaggtgagtctttaaaaattcatctttttaaaaggtgcggtggcttatgcctgtggctcacacgggggctcccagcacttcgggaggccaaggcaggaggatcacttgaggcctagggtttgagaccaacctggccaacatggccaaaccctgtctctactaaaaatacaaaaaaaattggctggcatggtggtgtgtgcctgtaatcccagctactcaggaggctgaggcacgagaattgcttgaacctgggaagcagaggttgcagtgagccaagatcgcaccactgcactccagcctgggcaacagagcgagactctgtctcaaaaaataataataataattaaataaataataaaaaataaaaggtaagtctagcagctcagtagagaatgcaaaatctaaaagcaagatgggaaccctacccgaatatcttgagctgagagtgaaggcgatttggctccccaaaggaaaattaaggggctgtcactagaagaaaaggaaatcactgctgagcatgcaaaggtccattacaaagccttagaagtgaagtttctggattgcagggcctgcatgttttaaggatttgatattgacaaacaacttccaaaaagtctggatttggatttggatttctatgatcaaggtatcgttctttccctacatcctagaaaagtctaggatcatcaataaaataatactcttggctagtgtggtggctcacacctgtaatcccaacactttgagaggcttaggcaggcggatcacttgacatcaggagtccgagaccagcgtggccaacgtggtgaaaccccgtctctactaaaaacacgaaaattactttttttctttttttttttttgagatggagtttcgttctgtctcccaggctggagtgcagtggtgcgatcttggctcactgtaacctccgcctcccgagttcaagcaattctcctgcctcggcctcctgagtagctgggattacaggcacatgccaccaggcctggctaatttttttttttttagtagagatggagtttcaccatatctgccaggctggtctcaaactcctgacctcaagtgatctgactgcctcggcctcccaaagtgctgggattacaggcatgagccactacacctggcctaaaaatacaaaaattagccgggcatggtggtgtgcgtgcctgtagtcccagctactcaggaggctgagggacaagaattgcttgaacccgggaggcaaaggttgcagtaaaccaggatcgcaccactgcactctagcctgggcaacagagcaagattccaactctctctctatatatatatatatatatatttttttttcttggcaatttgattggagaaatgatacctcactgtcatctgaatttgtttgtccttgattcctggtgaggttgagaagtaggcccttctgactcaccatgaacaggccatgatgtctgaggtgtgcctggtgtctgatgtctgaggtgtgcctggaggtgcacatataagtctccctctgctcccttgacatctcccttatcccctgcccattgtggatacacagctactccagagtcctcaggaggactacaaaggcttcaaaacaagagcaaaattgctacattgactatgcaaggagcaggcccagagatggacaatgattttgcaagacccacacagtgtacttgggagttggggtcaagagaaaagacctgtgatataagtggttcagagacttgggggctgataagggcaggctagagaatccttatctgaaaacccaattaccttgccctgttttggtgttgaaaacctggattgctgcattcttttactttctgtgtcttttatatagaaaaccatataatatgatggatatattgatccctactgcacatctgccccaaatccttaattgaagagattgagacccagaaaaaaaaaaaaagtaattcttccaaggtcacatagaaagctagtagcagtgtcaggactagttacccaatattttcaactctgctgtcactctcaatacaaaaatcctccatatatcctggcatttcaggcagtgggaaaatctcttcttttagggagaaaagaatccaacagatacattatttctccaggcctgggcaacagagcaagaccctgtatccaaaacaacaacaaaaacaaaaagataaaaaatagtttttaaaattaagaaaaaaaaagaaatgaaatgagcctccttaccaaaaatgaacagcacaggaaaggtggacttccaggctttccactgagtcccttcctagccagtgtctcttcttctcttcattgtaagggttttagaaagaattatttacacttgctgacctcactgtttcacttacctttcagttttcaaccccattgactgttttctgcccctacagaaatggctttcactgttgttgttgttgttgttgtttttcccttgtaatccctctgtatgctattatacccttgacatctgtttcaagcagggtccagtcagagaaacagtaactacaggatgcagctaccacccgagggctgagggaactaaaggaaagagatgccttttcttttcttttctgagacagagtcttgctctgtcgcccagtcgggagtgcagtggcgcgatctcggctcaccacagcctccccaggttcaagcgattatcttgcctcagcctcccaagtagctgggattataggcatgcaccaccacacctggctactttttgtatttgtagtagagatggggtttcaccatgttggccaggctggtctcgaactcctgacctcaagtgatccacccaccttggcctcccaaactgctgggattacaggcgtgagccaccgtgcccggccaagaatgagttttcaaaacccgagttcagaagaaggattctgagtggttggttctcagatctctgaggaagcggaaggatgaccctagggggagggccaccgcatgttagaacccagcagggggctgtgacagacaggctggtgctcggagcttcatctctttctgccgttttcctctcagtttttgctctggttatgtcatatttctcattttcaacaccaacatgagcctttgtacagacattcctccacctggaaccccatttcagctcatctacctgttgctttgtatttattcttcaaaactctgccgtcttccctgaccttccggagccggtgtttgtggcgcctcctgctggtcactgggttcaggcagtttggagctgggtggaaggaacgggtagtatattaagtcttgggccctggaccttgttggctgtcctctccctgctgacctaaatgacaaagggaggggtgtccagtcagagtgtgagggctgtacccgtgggcagctgagggagtgcgagccacaggccaggcactctccttctcccattagctcagccgtggcatcggacttgcagcttcattttgggctgccttagccatgaagctccttttgctgactttgactgtgctgctgctcttatcccagctgactccaggtaacctgaacctccttaaggaaggggcagggcttagagactaaggcctggtcagagaatcccaagggctagaaggatgggctgcaggttgtcatctagcaccacgtataggaggcaggaggcgcctcaccagcagcaggtgccagctgatagatgacaactacaacatccagagctgctctctcagcggctccatccctcctcttcctgcccagctccagggagcatgtgggggtggcctagtgtgtgaggaggagtgggaggggtgagcaagagaagcaggaaagaggagaggcaggtatggcccttttgcaaaatagtccccagaatgaacgaagctttgtgaagatcacagctaccttaatgggagagaaagctcatttgtacttagctgtctctgtgccagactctgcgctggaagctaggaccacggagataaatgacatggtgccaggggaactaactggaggagacagttaaatagcatttataacccagggtgacacggctgtggcagtgggaaaccagggggctgggtacacatggtccagcccaggctgagggaaaggagagtcctcctggagggatatcctgagtcctaaaaagtgagtcgaaaatagaaaaggaaggagaggggaaagcagaagggtgtcccaggcagagaggtcagcctatgcaaaggttggatgcgggagagagcatgggagtgtcggggacctgcataacatggaggggtgggttaggagagaggcgggggtaaagctgaggaagcattcaagctccaggtctcagtgggcctcaaatgccaggtgagggacccatgggaaggtttaaacagagaaagaccctggtcagacctaccacccaccaattccagcatgagccacctatcccttcctgctcatctggcagaagtttccacccaccctaaggctgtcggctaacctttctacagagtcagaaacgtgtgaatttcctaaacaagctgacctccgtccttgtgtcttcctgaggccctaaaacaccactcacctggagtagggaggaaagcccagaccccgggttaaaacctgccccatcattttctgactctgtgagccccaacaagaagctcagctgctcagagtatcaatttcctcatttctcaaactgcaataacatcaagtgtgtaataatatcaggttgagggaacaacattgaacacactgaaattttggtctgcaaaagaaatatggcttctctattttctctaactcaccaaactttcccaggaacttccatcctgactgtgggagttagtggtgggaggagcaggactacagagataaatgacatggcaccaggggagcaaactaggggagacagttaaatagcacttacaacccagggtgacaaggcacataggggctgggcctgaactcagcagttcaatatttgtcttttctgttttaaaatgatttctaagctaattcaatctcttttgaataagtgttgagtctttcagcatgtctctttcttccatcaccctttctctttcctgggatagtatctggttacagggaaaagtaacttgatatgtcatcaaataattaattgcttcattcagtaaatacagttgaatggatttcttgttccaagcactgtgatgggtgctagaggtagaactgggaacaaaacaagataagcaaaatctctgtcctcttggagcttaccttctactggaggacccaaagaatttgaaaaataaatgaaacatatggtatgtcagataatgagtacagtgagcagaataggcaggaaaggaaatagtgaacaccaggggaaggggaaggtcatttgctttttttttttttttttttttggagacagggtcttgctctgtcacccaggctggagtgctggagtgtagaggcacgatcttagctcactgcaacctccacctcccggattcaagcagttttcatgcctcagcctcctaagtaactgggattacaggcgcctgcaaccacgcctggcaaatttttgtatttttagtaggatacggtttggccatgttgcccaggctggtcttgaatccctgacctcaagcaatctgcttgcctcagcctcccaaagtgctgggattacaggcttgagccaccatgcccggtctttgccatttttaaggggttgttcatggaatgtctcactgtgacctgagggaacaaccggtgtgagcatgtggctatggagggaaggaaattcaagctggggaaaacagcaagtgcaagggtcctgggataggaacataaggaggtggggtcaggtcctgtgctggacccttactgacttctgggatcacgaccctcgttggatgtggttagtagcgtcctgctagcacttactactggatttcatgactgatgaaatctctcagcccttttggggtccccactgactcgacccttcatctcagccagatcttccatctggtccccaagttaaggctgttcacaccctcccttactgccttctgcactaggggtgtactcttggcaggtccctcactggttttcctatctcagccagagacaagggaacctggggaccttctgggtctattttattcaacagagagctgacagtgatgctcagccacttcccttagccatttctaatcccccttcaggtagcaccatgcagtgctatatccatgctaaagataagaatttctctgaagagctaccagtttccctgagctatgctctaagaggcagagagtaagtgtcttctgcgttggcaatttctttcgaccaatctgggtattcatagcaagagactctcttgcccctacctttctcacattaattatctctacttcctgagtgttcaggtcaaccagtagactgctagcaggagacacacgaaaggcctttgtccctagcttgttggtgggtccaccatcaggctggcagaatgaggcatgggttctagcagggctctcaggcccactgctgctgctgcgggagctggatttaaacttccagcttccccagaaattatgggcagagtatttcccctctacttcctgttgggtatggtagtggtgacagaggttaaatggaagctactttagctggaccctcagccttagcctcctatagcttatgatgaagtggtattgtctgaaccccccaggttcatctaataatgtataaaggagctctttgaaatttggaaatccctgaacttccttaacaaatgttggtccttaaaatggtctttccatgcacaacccttatctcatttaagctgagcaatgagtttgctgttctgttgttcaccattcccccaaaacccagaaactctgcccaattctgctttttgacaaccaatggattttatgattaaaggggattgaaatatgcatcacttcaatattttcaaaatattgtcatactcaccgttaggttaattgtgggaattcaggagacatatgtaaagcccagaaacccagcagagatgagatttaggtgggacacctgcccttccattatacatcctcacagcaccctgagttcgttctttataatttttatcatactctagttaatcaaatatctgggtatctattttttaatggctctttctcccctcattagactggaagttctctgagggtaggtgtctcactcatttatagttttatctccagtgtataggcctctcagtctatacatgtgagtatttccctggtgtagacatctggaaaggaattgctaggtaaagactgtgtatagttttaaaatgtgtaagttattgctcagtaggctccacagatgctaaaaaagtgtatgagtgtcattcctttcactcaccaatagttcctcttgacactcttaaattaaaaattgagattttgttgttaaatggtggctttttccttatctttttgtaaactaaaacacagaatcacagatgctgcacaccacataatacaagtgtgcagcttaatggaggttataagtgcacatctttgtaaccaccactcaggtcaatggacagagcattgacagtcactccgaaaacgtctccacctattccatccatcacaattgtcttcatcccccaaattaagcactctcctgacttttatagcaatcagttctttgcattcctttacagtctcattgctaggggggcatccctagacaccctatttatactgttaaaatctgatatctctttagattccttgaattttttaatttactggttccatcttcatccctttcttatctttacaagttatctgttgaaaaaacataagtcatttgatctataactttccacaatataaattttgctgattgcatactcaaggtaaaattcaatgtgttcctctgacctctgcatttcctgcaaatcagcacctgtatccagaggtttgatcaggctcaagttctcccattttggcagaactttcagtggtgatatgttctttcattaggaggcacataatatctggttgtctgtcttttaggacaataggaatcaatgatgctcaaagcctagatccattaattttttggccatttcaaaatgataatattctgttaagtgatattctttatttagctggaacagtcatatgaaaaagatactcctcattgtctactatttgatttcttagcagtacagtgcatataggaaagacagaatacaggcttgatgatttttctttatttatgaatctggaagataatgatctattgtcctatctccccaaattgtgatcaaataatttttttgttctttagtttggatggagtctaactctgtcgcccagtctggagtgcagtggcgtgatcttgactcactgcaacctccacctcccaggttcaaacaattctcctgcctcagcctcccaagtagctgggattacaggtgcacgccaccacgcctgcctaatttttgtaattttagtaaagacgggggtttcaccatattggtcaggctggtcttaaactcctgacctcaggtgatccacccacctcggcctcccaaagtgctgggattacaggcatgggccaccgcacccggccgacgaaataatttttgtatcattaaaaatgcatggatttaactatatttaatgaatttgcattcattacgatctttatgcttaaggaaactgaaattgtcccatccgtggctaggtggagcttctttaatatgacccttgagccttattttacatatccctggtaacctttgatagcttacttgtgatcaagtccatcttataaagaccacaaggacacactagcagtctgacggtcagatctattaacttaccacagcaaaggaaactgcacaccaaaggacctgtgggtggttgggggcgcaggaggagtcaccaaacgaagaaacaaatagggtactgtaggatgacagaaaagggcagattccagtataatgtaaatgaagcagggtctgatagacttcaaagcaaggcagggccacagggcaaagtgtaaaggaattaacatcaggcctaggctgagaaacggattcaggatcctgtttccatggaaagtacaaaatgaggagagttgtggaattttgttttccaaaaccccttatctgacaccagcacctggctttgaaatgaaggctgcttttctgtactgaaaggctcagttcctgggggaagaatataacgtttccttcttgccgatatgatttcaaatacaaagtttccgagagttgtgattagagaaaagagggtttctcagcactttgttcttttgttaattaacaaacgcagtttcacaggctcacactggctatctggagtgacgagatattctaggccggtcttgtgcagttcctgcaccaggtcttgaattcgttctaagttttacagcagacagcttcaccccagtctcacctcaaataaaaacatgccaattcgcacattgtgtaagaaccttaaaacagtatactgtacttccatttcacctctcccagcctttgtgctattgtcatacatttctcttctgtgtatgctatgaactccgcagtacaatgctgttattttactttaaacaattatcttttaaagaaatgtctcgggaggcagagtctgcagtgagccgagatcacgccactgtgctccagcctgggcgacagagtgagactccatctcaaaaaaaaaaaaaacaaaaacaaaaacaaaaataggcccggcgcggtggctcacacctgtaatcccagcactttgggaggccgaggcgggtggatcacctgaggtcaggagtttgagaccagcctgaccaacatggagaaaccccgtctctactaaaaatacagaattagccaggcgtggtggcgcatgcctgtaattccagctactcgggaggctgagacaggagaatcgcttgaacccgggcggtggaggttgcggtgagctgagattgcgccattgcactccagcctgggcaacagagcaagactccatctcaaaaaaataataataataaaaataaaaataaataaatgtttaattgagaacaaaagttgtttacatttacccatagttatcagttctgattctctttactcctttatgtagacatccagatttccctctggtaccattttcttctgcctgaataacttcctttagcatttcttgtagtgaaagctttcagtgatcaatgttctccgttttcaaatacatgaaaaagtctatttctccacttttagaatatttttcctctgtaaagaattctgggcttttttccttttattactttaaagatctctctctaccatcttctagtgtgcagtttctgacaataagtcttctgtgttggtttttttttttcctttctttgagacggtttcactctgtcacttagggtagagtgcagtggcgtgaccacagctcactgcagcctcgacctcccaggctcaagtgatcctcccacctcagcctccctagtagctgggactacaggtgcacaccaacacacccggcttttttttttttttttttttttttgagacggagtcccgctctgtcgcccaggctggagtgcagtggcgctatctcggctcactgcaagctctgcctcccgggttcacgccattgtcctgcctcagcctaccaagtagctgggattacaggcgcctgccaccatgcccagctaattttttgtgtttttagtagagacggggtttcactgtgttagccaggatggtctcgatctcctgacctcatgatccgcccaccttggcctcccaaagtgctgggattacaggcgtgagccaccacgtctggcctaatttttttatttttttggagagacagggtctcacctaggctggtctcaaactcttgggctcaagcaatcctcccatctcagcctcccaaagtgctgggatttcaagtgtgagccaccacacccagcctcttccagtatttttaccttttctcctatgtacataacgtgtcttttcttctggctttttaaagatttttttcctttcacttgattttgcaatttgattattatgtgcctttgcatgcttctcttttggttttattcagcttgtagttcaccgagggtcatggttctatgggcttagagttttcatcaaacttgaaatttttcagccattattacttcaaatacttttcctgcccctcccctctcctctccttttagtattccaattatatgcatgttagactacttgttattgtcccatgggtcactgacactctgctcttttttccccccatctttttctctccatgtttcactttggatgatttctgttgctatgtcttcaagttcatttatcttttcttcttcagtctaacctactattaatctcacttagtatgtttttcatttaatatttaatgtttcatctcaactattccatgtgaatatatacatatatatatttttttttctttgagacagagtttcgctcttgttgcctaggctgaagtgcgatggcacgatctcagctcactgcaacctccacctcccaggttcaagcgattctcctgcctcagtctcctgagtagctgggattacaggcatgtgccaccacgcccagctaatttttttttttttttttttttgtatttttagtagagatggggtttctccacgttggtcaggctggtctcgaactcctgacctcaggtgatccacccaccttggcctcccaaagtgctgggatcataggcttgacccatcgtgcccggccatgaatattttttacatctttatttcttctcatcatgctcatggcttcctccaccttttttactacttggagcatatttatcatagctgttttatcatccttgtctgctagtttcatcatcattgtcatttctgtgttggttgatttgtttttctcctggttatgggtcatattttcctgctttttttttttgtatgcctgaaaaatatttttacactttcagtttctgtattttgttacactcctttaaagagttagatatttttcttgcatgcagctaagttagtgggaatcagatgaatattttcaagactgacgtttaagctttgttaggatgggtacagggtattctttagtctagggttaatttagcccccactactaaggcaatagccttccgagtactaaatgctgcagattttacagggtctttccactcaggcaggtggaaacacaagctattcccagacctgtgcaatcactgggaattgttctgcttacttctttttggtgtttggtatttttctccccctcaggcctttggtagtttcctcttgcacatgcacagaaaggcacttaaagactacagggtgggccaggcatagtggcacatgtctgttgtcctagctcctcggggaaactcaggtgggagagtcccttgaactgggaggaggaggtttgcagtgagccagaatcattccactgtactccagcctaggtgacagagcaagactcatctcaaaaaaaaaaaaaaaaaaaaaaaaagacaatccgcacacataaaggctttattcagctgatgtaccaaggtcactctctcagtcaaaggtgggaagcaaaaaaacagagtaaaggaaaaacagtgatagatgaaaagagtcaaaggcaagggaaacaagggaccttctatctcatctgtttccattcttttacagacctttcaaatccggagcctacttgttaggactgatactgtctcccttctttctgctttgtgtcaggtggcacccaaagatgctggaatctttatggcaaatgccgttacagatgctccaagaaggaaagagtctatgtttactgcataaataataaaatgtgctgcgtgaagcccaagtaccagccaaaagaaaggtggtggccattttaactgctttgaagcctgaagccatgaaaatgcagatgaagctcccagtggattcccacactctatcaataaacacctctggctgatccctgcgtttgcctgttagtgaaccccagcagctcccaggagtgcctttcgggtggtttgggatgtcacaactgttttcacaataataataagacattttttaatttttttttttttttgagatggagtcttgctctgtcgcccaggctggagtgcagtggcgcactctcagctcactgcaagctccgcctcccgggttcatgcccttctcctgcctcagcctcccaagtagctgggactacaggtgcccgccaccacacccagctaatatatatatatatatatatatatatatatatatatatatatatattttttttttttttttttttttttttttttttttagtagagacggggtttcactgtgttagccaggatggtcttgatctcttgaccttgtgatctgcctgcctcggcctcccaacatttttcacttttttaagctctctcgttcacaagtgtataggggaattttctggaatctccatgacatataatgacataattgttctggcagctgacgaaagatgtgcttatgtgctcttgtgtagaattttttaaggtagaaggctcaaggtataagtatgctcattttcagagattcatgcaatttgttctcagtaattctactgtcctcttacaaactatctttggttatattattaactgtaataatcaatctctgtaccttcattatcatataataagtcattactttgaaatcccacaacttactttgtaccacaagaaataagaacactttatcgtcttggtttgcagaggtattttgttctaattttttattttttatagagatagggtctcactttgttacccagcctggttttgaactcctggcccgcctcagctttccaaagtgctaggaatacaggaatgagccaccactcccacggggacttgcagaggtatattaacaacagtcctagctgtctaacagaataaaggacacgctctcccttaaggaaaaaataacacctattctagtctctatagttctcttaaatacaatttctgacatatatacaattttaaaattataagacatgcacagaagcaggaaaatatgacccataatcaagaataaaaataatcaattagaatcagacccaaagatggtgatacagtttggatctgtgtccccacccaaatctcatgttgaattgtaatccccagtgttggaggtggggcctggtgggaggtgattggattatggaggtagatccttcatgaatggtttagcaccatccctttggtactgttcttgtaatagagttctcacaagatctggttgtttaaaagtatgtggcactgtctcgctcttcacttccctctgctctgaccatgtaagacaggcctgcttctccttcaccttctgccatgctcaaaagtttcctgaggcctcctcagaagccttcatgctccttgtacagcctgcagaaccatgagccaattaaacctctttttttttttttgagatgaagtcttgctcctgttgcccaggctggagtgcagtggcatgatctcggctcactgcaacctccacctcccgggttcaagtgattctccttcctcagcctcctgtgtagttgggattacaggcgtgcaccaccaagcctggctaattttcatatttttagtacagacagggcttcatcatgttggccaggctggtcttgaactcctgacctcaggtgatccaccctcctcgacctcccaaagtgctaggattacaggcgtgagccactatgcctggcctaaacctctttcctttataaattacctggtctcagggtttttttttttttttgatagcagtatgagaacaaactaatacagatggagtagttgttggaattaacagataaccttaaaataactattataaatatgttaaagaaattagaagattgataaaatgaatgaaaagatgaagaatttaaatacacagaaaaatagtgtatagtgtattgttttccacctgctgcattacaaaaccactccagaacttagtagactaaaataacaactatttgttatttttcacaattctgctcattgattaagtggttcttctgatattctcacgaggtcattcatgttactacatctctcttcacgtagcctctccaccgcaaagaagttaaccttggcttcctctatgatggctggggccaagagcctcccaaagtgctaggaatacaggaatgagccgccattcctggtcttgcagaggtatattaacaacagtcctaactgcctaacagaagaaaggacatgctctcccttagggaaaaaataacacttattttagtcttatagttctcttaaatacaatttctgacatatatgggtaaacctcaacatccagcatttctcaaatttctgtttgtattacatttgctgaagtcccactggtaaatcatatgccagtcactgtgaaagaggactacataagggcatgaatactaagaggatgattcattgcatgatggaaactctaagaataaattgggccttctaaactgagacatgctaaaattaagaatttattggatggtaagccaggcgtggtggcacatgcctgtagtcgcaactacttggtaggctgaggcaggaggatcacttacacccaggagtttaagtctgtagtatgctatgatcatgcctgtgaatagccacatgtgcactccagcctgagcaaaatagcgagaccccacctcttaaaaaaaggaatctattggatgggtttaacagcagaagatagggcattgtggaagaatgaatcagtcaactcagagacagattagaagatatacaaaccaaagcacagagagaaaaaatgcaaaacgagcataacagagtatgagagacttatgggacaatatcaaataatctaacatatatataattaagtcccagaagaagagatgggagaccaggcacagtggctcacacatgtaatctcagcactttgggaggctgaggcaggaggatcacatgaatccaagagttcaagaccagcctggacattataatgagaccccctccctattttttttttcttttcgagatggggtctcaccatgttggttgtgagctcctgggctcaagcaatttggcctgcctcagcctcctaaaatgctgggattacaggaatgagccaccatgcccaaaccccacctatctctattaaaaaaagaaattaaagagggcaatgaggaagaagaaatatttttaaaagataatagttgaaaaatttccaaaattgttgaaagacatcaatccacaagaaattcagtgaactccaaagcagcatagacacaaagaaaatcaaacctgccaggcatggtggctcaagcctgtaattccagcactatgggaggccgaggcgggcagatcacctgaggttaggagttcgacaccagcctggccaacatggtgaaacctcatctctactaataatacaacaattagctgggcatggtggcacgcgcctgtaagcccagctactaaggaggctgcggcaggagaatcgcttgaacctgggaggctggaggttgctgaggtgagatcctgccactgcactccagcctgggcagcgaatgaaactctgtctcaaaaaaaaaaaaaaaaaagaaggaaaggaaagaaatcaaaccctaaacatatcacagtcaaactgctaacaattaaaagaaaaagtgcctctggaggctgaggcaggaaaaaggcgtgaacccgagaggcggagcttgcagtgagcagagatcgctccgctgcactccagcctgggcgacagagcgagactccgtctcaaaaaaaaaaagaaaaagtgcttctcagtacctatgaatatttcatacaaaacatgttcaagaatttatggaaaaagttagaaaaccttattgaaatacaatataaaaagcctaaattaatagagaaacatattatgcttatgaattagaagtctcaatatcttaaagacgtcaattctatactaattatttcctagattctataaaattccagtaagatttgttcataacttgttcaaaattgtgtatatgtaaacaaatattttgttagggacataaacatgtataataaaactttcaataaaagctaaggagataataaatacaaatttaggataacagttacctctaagaatatagcaataggaaggggtaatggtgatttttttatcgcacagtagacagtgaggtgttctggatgtgaggtccaaatttgtctttgtgatagctggtgttattgagccacctggaggcaatattgctgcagtttaaatatttaggatcctggatggggatgtgggagggaagggctggatgaaccttccagaatgtcagcagtgattcctggagtcttccagttaatggcacccaataactaaatgggcaaaagatgcatgggagattggcctgtgagaacactgaggacttggggatggatctgctatctccacgtgcaaaaggatttgttaatctgggagttcctctgagatctagcccttgtccatctctttggttgccttttttttttttttttttttttgagacagagtctcactctgtcgcccacgctggagtgcagtggcgcgatctcggctgactgcaagctctgcctcccgggttcatgtcattctcctgcctcagcctcttgagtagctgggactacaggcgcccaccgccaccatgcccggctaatttttttttttttttttttttttttttttttggtatatttagtgcagactgggtttcactgtgttagccaggatggtctcgatctcctgaccttgtgatccacccgcctcagcctcccaaagtgctgggattacaggcatgagtcaccacacccggcctctttggtttcatcacataccactcagttactccatctctttcctttaatttctgttttcctttagcttttttccccctaaaaaaaaatcatagtttatttttcacatcctgggttttttatttatttaatagctttattgaggtataattttttttgagatgggatttgctctgttgcccagactagggtgcagtgttgcaatcataactcactgcagcctcagcctcctgggctcgagcgatcctcccacctcagcttcccaagtacctgggactacaggcgtgcaccaccacacccagctaacttttttgtatttttcgtcgagacaaggttcctccatgtttgcataggctaatcttgaattcctggcttcaaatgatcctcctgcctcaatctcccaaagtgttgggatcacaggcatgagccaccccatgcagtctttcaaggtataattaacattcagtaaactgcacatatttaaagtgtaaaagtttctaagttttgtcatgtgtgcacccatgaaattatcaccaaaatcaagataataaacatatctgtccccctcaaaagttttcttctgcttcttcgtaatcctttctttttttttttttttttttttttttttttttttttgagatcttgttgcccaggctggagtgcaatggcacgatctcagctcaccgcaacctccaccttccgggttcaagcgactctcctgcctcagcctccgaataggtgggattacaggcatgcgccatcatgcctggctaattttttttgtattgttagtggagatggggtttcaccatgttggccaggctggtctttaactcctgacctcaggtgatccacccgtctcagcctcccaaattgctgggattacagacatgagcaacctgcctggcctggatcccattaattcttgaacctcatctccaactattcttgccctggctcactccacttaaactatgctggcctcctagccatttctcaaacacaccaagcatggttccacctcagggcgtttgcacttgctattcattctgcctggaactctcatcctccaatatgcaagactcactctctaacattctttgggtttgttcaaatatctccatgtcactgaaaacttctctgaatatgctatttttaatctttaaaaaaaaaaaaaaaagctactcttggccaggcacggtggcttacgcctgtaatcccagcactttgggaggccgaaagcgggcggatcacaaggtcaggagctcgagaccatcctggcgaacatggtgaaaccccgtctctactaaaaatacaaaaaattagccgggcatggtggcgggtgcctgtggtcccagctactcgggaggctgaggcaggagaatggcatgaacccgggaggcggagcttgcagtgagccgagatcgcgccactgcagtccagcctgggcgacagagctacactccatctcaaaaaaaaaaaaaaaaaaaaaaagctactctcccttacttccttttttgcttgcatttctccatagtatttatcagcatctaatataatatttttttcttgattgtatttcttgtctccctgtccgctgtggatttatttaatgttggatgtattgatatatatatgaataaacattattcaatgtatatgaataagtatatattatattgcctccccagataaatatatatgtatatgtgtgaatatatatttttatatatatctgaggaggcaatatatatttcaacgtatatttatccaatatacataaatgaatttgggatccagtttcccaaataaatttggggttcctcatgtaaaattccctccattgaaatacctagtatggcttttgttttctagctagatcatgactgatacagtacatggaacatgatttattcatatatattgagtaaatatatattgccttcccagatgaatgtatatatatgaatatgtatgtattcatttattcaactacaaatttactgagcacctatgtaccagtttagtgcttggagaggggggtaccttatgattggagctggtgcctctgaaggacatcgcagttctggcaatgaacccatagccacctaagctgctgggaggatacagatggaatccaaagcagagagtgaatgccttctccctcccctcccctcccctcccctcccactttctagcctcccaccattgtctgcaattagcaaactcttagtaggaagccacctggtgaaggagtctgggaaatggtaatatcggactcccagccccagcagcacagagcagaatatagaaggctgggcttgaggccgcactggcacaccatttaacttctgagatgtaagtataaatctgaagtaacatcccaaaaaagtaatcatcggtattaattattacaaattctaggagtcacattttaaaggtttaatattagaatgcaggaacaattacccctgcagtcactgtcctgctcatctcagttcactgtggcctcaacctcctgggctcaagcaatcctcctacttcagcctccaaagtagctgggaccacaggcatgtgccaccatgcctggctaattttttttttttttagtagagatgagatctctttatgttgcccaggctggtcttgaagcgaaggagttgctatgctaaatagatgctgtactaaatagatgctatttgctgtactaaatagatgctcagtttcaacatccactaactttttcagtcatggaataaagtaactcaagaaaatgaatttggccacatgtggtggctcatgcctataactgcagcactttgggaggctgaggcaggagagtctcctgagcccaggagttcaagaccagcctgggcaacataggcagacctcatctctaccaaaaaaataataataattaaaaaattacccgggcatggtggcacgtgcctgtggtcccagctacttgggaggctgaagtaggaggactgcttgagcccaggaggttgaggctgcagtgaacagagatcacatcactgcactccagctgcctggacaacagaatgaggccctgtctcagaaaaagaaaaaaaaaggaaacaaaaaacgaatttcatattcccaatacaaagaaataataaaggtgatgaatatgctaaatacccttatttgaccattacacattgtatgtatgtatcaagatatcatatgtaccccataaatatgtataaatattatatttttttcatttttaataaaaattttaaaattgccaggcatggtagtgtgcacctataattcaagctacttgggagactgaggcaagaagaccacttgagctcaggagttcaagtccagcctgggcaacatctcaagatcccatctctaaaaatgaataaattaattaaattcaaaattaaaagacaaaaataaataacgaaaaatttaaaaataaaaataatttaaaagaaaattaatttcagaaacatacttcctaaaaagaacttttgaatttagaaagaaattcagaatttgcagcttgaaaaaatgtcaaaaatattctaccttcaactactgaaaccgggtggtagtttatagcaaaaaatttggcaaactttattgtttaattttttagccttcataaaatttgtgattttgaaaatcagtgagaataaaatatgcctaaggtacctcacttttccctaacgctttcctctgttcttcattgtctttatacccaacagtatgtataaattgaaggtgacttatcatcgatgtcatggtacatgattttggagtctttcctacctgtgaaattttgaggtgacaaaatcgcatttagctttttattcatccttacaaggtgtgagaaattctcaaccacaattttttcctaaaaggcttatgtcctaaatggaattaaataactaaagaacaactaaaggcaagtactttttttttttttgagacagggtctcactttttcacacaggctggagtgcagtggcaccatctcagttcacagcagtgtcaacctcccaagctcaaacgatcttcccacctcagcctcccaagtagctggcactacaggtgcacaccacctcgcctgactaagtttcgtattttttgtagagacagggtttcaccatgttgcctaggctgggcaatccacccaccttggcctcccaaagtgctgggattacaggtgtgagccaccacatctggcctctaatagtttttttttaatgtgatgaatggtattttaacaaagattgaactataatataatctccattattttgcctagtgctaatattcaaaatattaaaaatattgattggatataacattctgaaggttatcaagctaacaaattttagctctcaatatttaaattaactcatattttctcctaagttgaattgtcgaaagttcttaattatttttctaacattgatagctttcacaatcatctttaactgttgcaacattttattcctacagtaataaatatatacttctatctcaaatgactaatgaatttaaacatgtaaagtgcatgagatttcattccaagttacatctaaagtgtttactatgtgaaaatgaatattcatatgtaaacaataaatccaaatgctatgttccaaaggtattatgcttattggacatgctggtttaccgtgcaattatgaaatcattgaacacacacaagttcacggtgccacaagtgactctgaagtaggtatctggcaattcatccttccaaagggtgaagctaaggctggatactgagaacaaagtcaaaattgggtttattcctagaatgtaagctccatacaggtagggatttgtctgctttgcccactgctgagtcctccatacttagaataatgcccggcacataaaaggtattcaataaatataaattgaattaatgaaaaacagaaaaatagaatgctgatgctagtggcgcgtaggtgaaaatcatcaagttgattttcagttgagacaacgatggaaatcattaggcatgcccaaatcagggagatcttagtttcagccaagggctcactggacttaagccagtctactgggttcaaattaggaggaaaggagcaaaattaacgaacacgtacaaaatgttggagatatatcattaaaaattgtgtcttggccgggcgcggtggctcaggcctgtaatcccagcactttgggaggccgaggggggcggatcacttgaccccaggagtttgagaccagcatgaccaacacggtgaaaccccgtctctactaaaaaaaaaaaaaaacccaggcgtggtggctcacgcctttaatcccagctactcgggaggctgaggcaggagaatgccttgaacccgggaggcggagcttgcactcagccgagattgtgccactgcactccagcccgggcggcagagcgagactccgtctcaaaaaaaaaaaaaaaaaaaccagcaaattccaaaaataaccgctagaggggagtatctcctcttgtgagtcattgatctagccattaagagagtcatgaaaacatcatgcttgtctcctggatcacccagctctttatgacacaaatggagctacatcataagcacagatagtttacccagactcaactacatgtgctcagaaaaaaaggaatttaaaggaaataagacttgggatgggtttttttctttttttcttactttttaaatcaactttgttttgcctttctgaaaaatcatataaatgaaattactcagcatgtatttctttgtgtctggcttctttcacttaacatagtgtttttgaaattaatttatggttgtgtgtattggtaaattattgctatttattgagtagcatattgcatggatataactcaacttgtccatttgcctgctgaacatttgggctgttttcatttatgggttactacaaataaagttgctacaaacatggatagagaaatctttgtatagacatatgtctatttaattttgttcgtttgtttgtttgtttgtttgtttgtttgagacggagtctcactctgtcacccaggctggagtgcagtggtgccatcttgactcactgcaacctccacctcctgggttcaagcaaattctccagcctcggcctcccaagtagctggaattagaggcacacaccaccacacccagctaatttttgtattgttttagtagagacggggtttcgccatgttggccagactggtctcaaacacctgacctcaagtgatctgcccgtgtctgcccccagagtgctgggattacaggcatgagccacagtgcccagccaacatgtctatttaattttgtaagtaactctgcacctgtttttccagttgcagagtagttgtccatgttacagtcccaccagcaatgtatcagcattccagtgctccatatcctcaccagccttgctatagtcagtctttttactttaattattctggtgagtatgtatggtatctcattgtgatcttaatttgaattctcctgattactaatgatattgaacatcttttcacgaacttattggccacttatgtattttcatttgtaaaatgtcatttaaatatttgcccattctgttattgagttttctcttttcttattaatttgtaacagttatttgtatattgtggatatgagtcttttgtcagatatatgttttgcaaatatgtgcaataagaatccgaataagccagaaaaatccctccttgagccagtgcctgaatgagtgggagatgggaattggattatttcctgggcagggaaagcttctggcagtgaagacatcacattgcattgtgtgattccactgtggaaagatacttatttttcaccaaaaaaaatggtgcctaaacataaccaaccacttcctttaatgcacggccagagaaatgtgatatgttccatcagtggaggaaaacttgctgtgtatgtcagtctccaaaaaggtgccttcctgagcagttttcaaggataatttaagtcatgtgcaattgtcacctggctctcagatttaaacctagccctagcataataataagcaattccactgaacactctgccattgaaagaagggagtggggatagaagtcagacacccagttctaccctgaactacctacagtatccatccattgttgtaacttccttgttcttctccttccctgtgaccccaaaggtgtccacctgatcagcaggagaagcccttctcatagaagagtctctgatgcgtgtgaaaatgccttaaatatatatatatatataagaatatatatataccaaaataccaacaggaattatgaaagacaggtgaatattttgaggcttatctatactatactttcttagtttttgacactgtattttatttatttatttatttattttttttttttttttttttttttttttgagatggagtctcactctgtcacccaggctggagtgcagtggcacaatcttggctcactgcaacctccacctcccaggttcaagcgattctcctgcctcagcctcctaagtagctgggattacaagcgtgcaccaccatgaccggctattttcgtattttcagtagagacatggtttcaccatgttggccaggctggtcttgaactcctgacctcaggcgatccacccacctcagcctcctaaagtgctgggattacagacatgagccaccgcgcctggcctccatacgtattttaaacatactactcaagttataaaaactagaagtgacttaaaatttttcaggaggaattttagtgctaaaaatattgttttggaaggctaagcacatacataaatttttatgatatattgatcagttaaaaaaccaggacacaaaatatctacagcttgattccattttatttttgtcacattttacatttttctttatttctgggtatttcttttttttttttttttttttttttttttttgagacagagtcttgctctgttgcccaggctggagtgcagtggtgtgatctcggctcactgcaacctccacctcccgggttcaagtgattctcctgcctcagcctcccgagtagctgggattacaggcgtgcgccaccatgctggctaatttttgtatttttagtagaggtggggtttcgccatgttggccaggctggtcttgaactcctgacctcaagtgagcctcttgcctcggcctcccaaagtgcggggattatagaagtgagccaccacagccggcctatttctgggtatttctgtacagtgaaaatactaatgattttagttttcttatttgtgcttctctgcttacatgttttccaatgaacatgtattacttttacaattagaaaaaaaatgttatttttaaagtacaaataagaatgactctggagtctggcacagtggctcatgcctgtaatcccaacattttgggaggccgaggcaggaggattgcttgaggccaggagttcaagaccagcctgggcaacatagcaagactttgtgtctacaaaaaatataaaaattagccaggcatggtggtgcacgcctacagtcccagctactgggaaggctgaggtgggaggactgcttgagcccgggagttcagagctgcagtgagccatgattgcaccactgcattccagcctgggcaacagagcaagactgtctccaaaaaaagactgactctgggagacaaaatcaggtggcagaggatcaggatagagttccagctccaccacttcctaggtttatgacctgggcaactttcttagttgccttatagagtcttagttaccttatagaaaaggcaaagataggccagctgtggcagctcacacctgtgatcccagcaacttgggaggccaaggcaggaggatcacttgagcccagaagttcagcctgggaaacatagcaagaccccgtgttttttgtttgtttgttttttgttttttgtttttgtttttagcaagaccccatctctacaaaacaaacaaacaaatcaaaaacatattagccaggtatggcagcatacacttatagtcctagttcctcggaggctgaggcagattgcttgagcccagtagtgtgaggctgcagtgagctatacgatctccactgtgttccagcctgggcaacagagtgaggacctgtgttaaaaaagaaatgaggagagagagagggagggagggagggagggagggaggaaggaaggaatgaaggaaggaaggaaggaaggaaggaaagaaggaaggagataataatatgtaactgtgggaattcaatgaggtggtatgaataaagcaattggtactttctaaaggatacttatatatcatcatctcaaccattcaatgattggtttggcttgagtagaacctgtcctccgaaaaagcacttctgagcacctatccaggtaacttccttctctagcatcccagagccaccaggctcaccttgcacatctccagtgtcaggggactcccttcctcccaaaatttccccatcacactgtcctgtcctaccagcgtgtggctccattccttgacatgtcactcgggaactgtatggccttcaacaagtcactttccctctctgggcttgcgggcctcatctgtgaggtattttggggactcttccaccctagaatcggctggtctcttcggcttgttgggtgtatcctaatgacttaggaagttggatgtatgcttagatgagggtctgtttgaacactgggaggaaaatggcagttcatgtgtgaaaatggcggtttaattttcagaaaagtatctagtctgttggtcttggcttcagccctaagtcattaggataccctataaaggaacataggaaaaccctttcacgctcagtggggcctgcctctcaagccaaatgtgccgtctcattctgaattccagaagcttattattgactctactataattattcactgttattatcaactatatgattaactcttgttattattaactctacctttcttcttgcatttcttctataaagtgctaatctcctgatattataattattcccattttatggttgaggagactttcagaggttcagtaatttttccggagttggacagagaaagtgacatggccaggactggaaccatttacaatggtcattagcgcccactctcctcaggtccctcacctccctccacagaccatttctcccacatcctagacctatcccccacccgtggtggggagaggagcacaggcgagcaggcagaaagaagagacaactggcaacctgtgttttattggacagcaggaaccagctactcatattcatgcttggggaccggtggaggtttcaatgcataggagagacagcacagggacgcatccgggcacaggtgcatgtaagtttcttgccttgtgcagtaagtttggcaggccccttgacccttccagcaccgtttgaattcacttctccctaaacagaggaaaaccacaggtcacagagcagcccatgggtcacacgttagaccactggtcacaagttaggccacagattcactaacactggtcacaagttagctctctggtcttctgttagatcactagtcacagatgagagtactgattacaagttaggttagaccacatgtcataggttagaccattagttacaaattagagactaaggccaggcgcggtggctcacgcctgtaatcccagcactttgggaggctgaggcaggcagatcacctgaggtcaggagtttgagaccagcctggccaacatgacaaaaccctttctctaccaaaaatacaaaaattagccgggtgtggtggcaggtgcctttaatcccagctacacgggagactgaggcaggagaatcacttgaacccagagggaggagattgcagtgagctgagattgtgccactgcactccagactgggcaacagagggagactccatctcaaataaataaacagaaactgatttcttgtccaggtaaagccacacaccaggtacacataagcacttttcataacagtgctatacgattatagttagtcttattacaatccctgctatacaggtaaggaaactgaggctcagtgaggttaataaccttatccagctgggcacagtggctcacgcctgtaatctcagcactttgggaggctgaggcgggtggatcacctggggtcaggagttcgagaccagcctggccaacatggcaaaaccccatctctactagaaatataaaaattagccgggcctggtggcgggcacctgtaatcccagccactcggggggctgagacagaagaatcgcttgaacccggaaggcggaggctgcagtgagccaagttcgtgccactgcactgcagccttggcgacaaactaagactccatctcaaaaagaatatatatatatatataaaaccttatccgaggtcataccaccattgaggagcagaatttggactcaaacccaagcaatctggcttcagagtccacacccattacataaactgcccctgacacatagggacttgtttaatgttaggttttagtgaaggaatttccaaacatgggcaatggaaaaggcaaggctttggggcaacaggtcctttgctccctccaagggtctttggtcacaacatgggatggagcctgtccttcatttattcactcaataaacacggagcactagaagtagtacaatgaacaatacagccatggtccctgccctcaaggagcttccagcgtcaaggaagacagttaaaaaacaagcatataaatacaagaaatagattctgtggtaactgccacactggaaatgatgagggtactgtgatggccagttagaatgcatgtgggaagtgaggggagactaggaccacatagacaagtttgactgttaaatgacatttctggacatacaacctcagactagcagagaacaagcaggccagaagaaatagcactgagtgggaggtggaggggaaaggcttccctgcatctctctggattaaaacacatcccatgtaatcctcaaatgatgccttaggcatatccacaggttttattcaaccctgccgagcagtccacacttccctcttactaaggtagagaatcttagaatgatacagtgctggcctcaaaatctccatgaggcaaagaatccaccctctgaagacggtgtgtagtataatcgttaacagtgtggtgtgaacccagctcagacctcctgggtccaaatcccagctcagtcatttcccattgagtgaccttggcctcagttcctcatctgtacaactctccttcagagcacagttaaaggatcactttagcacagtgcctggcacgtagtaaatgctcaataaataggaggcaagattatcagcatgacagcttagattgctggaacaaccaggacccattctaggtaaatcctctcactcaccagtaaagagaggaatgaacttgcccaagctcccatagccactaagtggtgggtctggaaccggaacccgagaccctagctcccaggtgaggacactttctataataattttttttttttgagacaggatctcactttgttgcccaggctggagtgcagtagtgtaatctcggctcaatgtagcctctaattcctaggctcaagcaatccttccacctcagcctcctaaatagctaggactacaggtgcacaccactatacccaactaatctttttgttttttgtagagatggggtctccctatgttgcccatgctggtctcgaagtcctgggctcaagtgatcctcttgccttggcctcccaaagtgctaggatttacaggtatgaaccaccacacccagccaagaaatactcttagcacatgaccgcatttgaacttcccaatcactccaatatccagcagcagttcctttctcctgcatgatctgcactctcttcctcatatctttgactctgtctcccaccaatttcctttgtgctccccccgctagccacaccaacctccttgctgctgttcaaacccatccatcaccctgcctcagggccttggcccttgatgctccctctacctggaacgatctttcctcgtattttcaccttattcagacctctattcaaacccactttatataaaataagatcgctggaatttacttcaaaataattcacgggaatggagagggaagtgaataacaaaacaggattggttcaaattggtaattgttgaggttgagtgatgggtaataagggctctttttattttctttttctattttttttttttaagacagagtctcactctgttgccaggctggagagcagtggcgcaatcacggctcactgcaacctccgcctcccgggttcaactgattctcctgcctcagcctcccgagtagctgggattacaggcgcccaccaccacgcccaactaattttttgtatttttagtagagatggggtttcaccatgttggccaggatggtctccatctcttgacctcatgatccacccgcctcggcctcccaaagtgctgggattacaggcgtgagccaccgcgcccggccagggttctttatactatttatttcttatttctggttgaaattttcctaaataccaaagtttctggctgggctcatgcctgtaatcccagcattttgggaggccaaagctggaggattgcttgaggccaagagtttgagactagcctgagcaacatagggaggccccatctctacaaaaatttaaaaatcaaagaagtatcctttaaaaactcatgctgttacagtattctgtatttctgcataagtttaaattttcccataataaaaatgtttaaaactcaccttatttatttatgttattctctctactttcatgtatatgtgaaattttccaaaataaaaagtttttaaaaagaaaaaactctgggccgggcatggtggctcatgtctgtaatcctagcaatttgggaggccggggtgggtcaatcacctgaggtcaggagatctagaccagcctgaccaacatggtgaaaccccgtctccactaaaaatacaaaaattagccaggcatggtggcacatgcctgtaatcccagctactcgggaggctgaggcaggagaatcgcttgaacccgggaggcagaggttgcagtgagctgagatcatgccattgcacgagcaacaagaatgaaactccatctcaaaaagtagaaaaagaaacaaatcttttttttttttaatttttattttttttattgatcattcttgggtgtttctcgcagagggggatttggcagggtcataggacaatagtggagggaaggtcggcagataaacaagtgaacaaaggtctctggttttcctaggcagaggaccctgcggccttcagcagtgtttgtgtccctgggtacttgagattagggagtggtgatgattcttaacgagcatgctgccttcaagcatctgtttaacaaagcacatcttgcaccgcccttaatccatttaaccctgagtggacacagcacatgtttcagagagcacagggttgggggtaaggtcaccgatcgacaggatcccaaggcagaagaatttatcttagtacagaacaaaatgaaaagtctcccatgtctatttctttctacacagacacggcaaccatccgatttctcaatcttttccccacctttcctccctttctattccacaaaaccgccattgtcatcccggcccgttctcaatgagctgttgggtacacctcccagacggggtggtggccgggcagaggggctcctcacttcccagtaggggcggccgggcagaggcgcccctcacctcccggacggggcggctggacgggcagggggctgacccccccacctccctcccggacggagcggctggccgggcagcggggcgcctcacttcctagtaggggcggccgggcagaggtgcccctcacctcccggacggggcggctggccgggcggggggctgacccccccacctccctcctggacaaggcggctggccgggcggggggctgacccccccacctccctcccggacggggcggctggccgggcagaggggttcctcacttcccagtaggggcggccgggcagaggcgcccctcaccccccggacggggtggctggccgggcggggggctgacccccccacctccctcccggacggggcggctggccgggcggggggctgagccccccacctccctcccggacggggtggctggcctggcagaggggctcctcacttcccagtaggggcggctgggcagaggcgcccctcacttcccggacggggcggctggccgggcggggggctgaccccacctccatcccggacggggcggctggccgggcggggggctgacccccccccccacctccctcccggacagggcggctggccgggcggggggctgaaccccccacctccctcccggacagggcggctggctgggcggggggctgactcccccacctccctcccggacggggtggctggccaggcagaggggctcctcacttcccagtaggggcggctgggcagaggcgcccctcacctcccggacggggcggctggccgggcggggtgctgatccccccacctccctcccggacggggcggctggccgggcggggggctgagccccccacctccctcccggacggggtggctggcccggcagaggggctcctcacttcccagtaggggcggctgggcagaagcgcccctcacttcccggacggggcggctggccgggcagggggctgacctcacctccctcccggacggggcggctggccgggcggggggctgaccccccccacctccctcccggacgtggggctgacccccccacctccctcctggacagggcggctggccgggcggggggttgacccccccacctccctcccggacgaggcggctggctgggcggggggctgactcccccacctccctcccggacggggtggctagccaggcagaggggctcctcgcttcccagtaggggcggctgggcagaggcgcccctcacctcccggacggggcggctggccgggcggggggctgaccccccccacctccctcccggacggggcggctggccgggcgggggctgacccccccacctccctcccggacggggcggctggccgggcggggggctgacccccccacctccctcccggacggggcggctggccgggcgggggactgaccccccccacctccctcccggacggggggctgacccccccacctccctcccggacggggcggctggccgggcaggaggctgatccccccacctccctcccggacggggcggctgccgggcggagacgctcctcacttcccagacggggtggctgccgggcagaggggctcctcacttctcagacggggcagctgccgggcggaggggctcctcacttctcagacggggcggctgggcagagacgctcctcacctcccagacggggtcgcagcctggcagaggcgctcctcacatcccagacggggcggcggggcagaggcgctccccacatctcagacgatgggcggccgggcagagacgctcctcacttcccagatgggatggctgccgggaagaggcgctcctcacttcctagacgggatggcggcggggcagagacgctcctcactttccagactgggcagccaggcagaggggctcctcacgtcccagacgatgggcggccaggcagagacgctcctcacttcccagacggggtggcggccgggcagaggctgcaatctcggcactttgggaggccaaggcaggcggctgggagatggaggttgtagcgagctgagatcacgccactgcactccagcctgggcaccattgagcactgagtgaaccagactccgtctgcaatcccggcacctcgggaggccgaggctggcggatcactcgcggttaggagctggagaccagcccggccaacacagcgaaaccccatctccaccaaaaaagtacgaaaaccagtcaggcgtggtggcgcgcgcctgcaatcgcaggcactgggcaggctgaggcaggagaatcaggcggggaggttgcagtgagccgagatggcagcagtacagtccagcttcggctcggcatcagagggagacagtggaaagagagggagagggagaccgagagggagaggggagaggggagaagggagaggggagaggggagaggggagaggggagaggcaaaagaaacaaatcttatcagagaccttctctgtccatcctcatcagccttcccatccccaccccctccatgcacacaccactctaaccccttcccttgcctttcctcttctcagcacttatcaccacccaacatatgtttatccacttattttctatctccaccaactaaagtgtcagctgcatgaaagcaaggaccttcttttctttcactgctacatgtctttcactgttattatttcacaaccatcataacataaatgaatatttattgagagaatcccattttatagattaggaaactgaggtacaggctgatttagcaacttgctctaagttgcccaccaagtcagtggtggggccagaacttaaatgctgatagaggcccctctgtcctccaggacctgagagtctagtcctcatttttacaagcacacatgtgcacacacacacacacacacatgcacacgatgttgttacctgatggcacatgacccagaaccaggagagccacaaggaacagaagcagctgtgtcatggccacggggctcctggggaggctgctggagagagcacaagaggaaagacccgagcaggctgagcctcgctgcttccagcccaggctttattgagctgcagatgaaggcagtgctgtgggcagcaggcctaagtgggagtatgaggccatgtggtccccaggctgcttgggatttcagccagctacgtgggaactggtcagccacaccctccggagcctgttgagctcggaaggggaggtagaattttctgaggcagtgtctagggtcagaaactagacatcttccccacctaagagagtggaaaaaatcttggcttaagagagacctagttcaatcccccgcatctccccctaactgctgtgagacatcagacaagtcacttaacctctctgagcctcaggctgttgtctatgaaatgatgacaagcatcccttacaaggccaagtgaacagcatgtatgcaggcctactctaaaatgggaagagtaatagtacccatgtcatagagagtaatagctacccatctcatttaggggactaaatgaagtaatacagtggctcctatactatggttcccccagcaagcagcagcaacacctgggacttgttagaaacaccagttctttagccctaccccaaacctactgaattcacctcttcctaagcagaagaaggccacaggtcacagagcagcccatgggtcacaggttaaaccactggttacaagttagaccacagattcactaacactggtcacaagttagctctctggtcatttgttagatcactagtcatagatgagagtatgggtgggtcccggcaaaatgtggcttaacaagccctccaagtgattctaacacaccgccaaagtttgagaacccctgagataatatccgtgcagagcttagaacagtgtctggtacacaggaatctaagttgcatcatgaaagatgagtaggggaaaaggtatcccgggcagaaagaatagaatgtgcctagaagagtagggcatgagccaagcaagggttttcctgggaggagaggttgaaatgattctgcagagaataggttggggcttgaatgccaagttcagacttttgtattatagacaaccaaaagttttttagcaagagtgtaagctgttcatattatagttttaaataaagaaactgaaacccaaagagggaagttgacttgcctaaggtcacacagcaattgtgctgcagagatggaaaagccaagtcacctcactcccagacaatgaagggtgctgcaccactcatggcccatcttgcaagttagaaaggtaagcttagagggccaagccacggaaggaagccaggcacgagggggttctgtatcagctccaagacctgtgggggctgagccagtctgttcagctgctgtgggagttattccaagctgaacacctgaatcccctcagccatgacaatgagccccacccacaggtgcagcctggtctccatgggctccacacacagacacaccccaatttctcaagacctaaagggaggcagcccagtcaaagagtctggatcctggccccttggatggccgacgtcaccagcaatctctttcctcctcctccatacctgggagcattttttttttcagccatcagtaatagaaacagtagacagagtggcagagacctcaggcccaggcccagctaagcctcagttggtgaatgaatgaatgatgccaaaataagattttcataattcttcagtgcagacttcctgagctctctcttcctccaagccacctcccaaaattaattcttcatccagagcagagtttcttaaagtgaggtcagtgaaccgcctgcatcaggatcacttggggcacttgtttaaaacgcagattcccgaacccctcccccagcaccgtggaatccgcctctcttggaaggcgggacctgaaaatttagcaagttccccaagtggtttttctgggggctaatatgttagtgcatccccttgatggagtggacagatgtggacgcagatggagctccagacccaggaatccagagcccccatccttcctttctcgtctgccaccctcacccggtgcgtagggctggcagaagcgggtcagctgagctctgcactttcagaaaagtcactgagcggccagggccttggggcggggaccccggggctgccctaatggggcggggctggatggggcggggtcgcggctcctcccccggccgaggcggcgaggggaggggaactggcctgaggggctgctcactgaggcgggtggtacagcctggagcatccagccgctggagctgcgagggaccctggacccctcccacgccgaggtaaagccctgcgctacgcgccgccaacttgctcaagttggagcagagttcgccaggcgattgaagggggattcggcagcgttggcaggaataggggggcttcgaaaccgcgtccctagggtgagggtcttcagacctgggacccggagggctggatagccctggacaaagacccctccaaccccaggatgggggattcacacccgggatgccggctgagaaagctcggacccagactccaggaatggcacagcgttcccgggccctgtggtctgccctccccgtcccctgccaggaccctgtcctgtcacctaacctggggcctgaccggcggcagctcccgtccccaaaagcagttggaggccgtagcgccagccgctcctgaatttttcacacagggggcgggtcagacacgcggttcccatggcactagggcactcgggttacagtcgggttacccccatacccccctcgcgcttctggagtgccaacccgccctcctgcctcttcctcctcagaccccgtgaaattgggcatcgaaagttaagtagcccctacccttgggggagacctgaaactgcactcccaacccagaagctgtgaaagagagcggtggggaaggggaggagggggacaattcagatgtctttcagagccagggcctcatgttctgtggcaagggcaggtccgtgtacacggaatggggagtgtgcatgtgaggacatcccaccttactactgcccctccacctgcctgtctgtcatcaggagtagatcatccttaagacaagggaatggcctctgggtgtgcatgtctgtgtgttcacagcctgcacactcactccttccatccggatccaggtttatgcagagcctgaggccagaaaacctagggactttctgccccaagaagctgaggcacctcctactcccatctgaacaagagggggatctggaagaagccatacagcagctcatcaggacactatagaaagaagcagctcaaagcaattggctgacagccaattcccccttctttcagaaggaaagaaggaagaagcaaacccccccctaccaaagatgacactcaacaccgagcaggaagcaaagacccctctgcaccggcgagccagcaccccactgcccctgtccccacggggccaccagcctggccgcctgagcacagtgccttccactcaatcccagcatccccggctgggccaatcagcctccctcaaccctcccacccagaaaccttcacctgccccagatgattggtcttctgaatccagcgactctgaaggctcctgggaggctctctaccgtgtggtgctacttggagatcctggagtggggaagaccagcttggccagcctctttgcagggaagcaagagagggacctccatgaacagctgggaggtaggggccatatgggctgggctgggatgtggccaaaggagcgaaagccctgtcaccagggacacagggctgccaagaacagttgtacaagtcatgcactgttcaactctaaggggcatcattcacttagactatgacatgcacgatgcccccccgccctccaaagttgtacagggcacagcctgcacaatggtcaaggggagggaaattcttgaatagaacaagaattttgccaacttcccatgaatgagaagtatatgattcatttccatgtcatgcgggtggcaattctgaattccatgttaagaaatggtggacttccaccaaggtcagaaactcccctccctgactcctctgactcttagattctcccagtcccatagacacccatccatggtcaccatgatctacagcaaaactaagatcctttgcagaagggagactccgagaccccaagttctgggccctgggttgctttattcccaagaactgctgtgagctgagagtgtcgggggccccaggatgatggggtacagggaagatagaagagatgaaggtaggcccctgaaggactggccaaaaggacatagggtgagtgggggaagggggttgattaaatgcagagaaaaggtagggacatctagccagactcctctctagtcttgacttctctctccgagtgagaacacatatgtgttacagatagggagactgaggtcaagagaggataacatgacctgcctgaagcactcactaaatcagagacagagcaggcctgggagaattcctagcccaactttaaccccaccaccccaccttcattcaatcaatcaaatctttctggcacctactatgtgccaggtactatggcagctggggagacatgggctcctaccaggagagacaggcatcaaacaagtgtgataagcgtttccgaggacaagtggagggggcgatatgaccagaaatggggggcagggaacaccacactctctcaggcttgcccgtcctccctgagatccagctcttccctcggttgcagaagatgtatatgagaggaccctcacggtggatggagaagacaccacactggtggtcgtggacacctgggaggccgagaaactggtatggcactgcaagcagaatttggggagaggggtgctgagcctaatactagactccttcctgtcccctcctggggacactacagatcaggtgtgagcaacggccatcctcagcaccctcccccaaaacccacagctcctaagcagtctttccaatcccaaacagaagacccttatgaccctgaccccttttctcactccacaatcccctcctagcagccatctcagaatgtacttctccccctgcagatctccccatcattatttccaccctcttcccacccctcccacccacattgtacagaaggaacgctggatttggccccaaaatacctaaggctgaaccccctttctttttcttactagttgtgtagttttgtgcaattgacttagccactccgagcttcagttttctcatctgataaatgggttaaccattcctgccttcctcatcagctagttttttaaagttcttatgcaatttcagaggtaagcccagtttaaagcatgaaaaactgctgaataggggtgaagaattgtaaatgataactcttagtaattatgacttggtagctagagaaaaaggaaatcagggcaggaagacagcagtaggcaggaatatgtccctattatgattttatctggtttgtgttttcttttcttttgctacatgggtaatacatgctcattgtagaactctgaggaaaaacacctaagcaaagagaaggatctaaaatcacctgggatcccatctctctaggggataggctgctcaaaaactaaatggtgagtcttctgattcccattctactgatgaggaaaccaaagaccagagcggttaaataataataataatgtgtccaaagctctcaaatagcaagtaagatccaaacccagatctacaaaatctttgtagatcttattcttttttttttttttttttagacagagtttcactcttgttgcccaggctggagcgcagtggcgccatctcggctcactgcaacctccgcctcccaggttcaagcaattctcctgcctcagcctcccaagtagctaggattacaggcacctgtcaccatgcccagctaatttttgtatttttagtagagacagggtttcatcatgttggtcaggatagtcttgaactcctgacctcaggtgatccacccgcctcggccttccaaagtgctgggattacaggcatgagccaccatgcccggccgaggctgtattcttatgcattaggactgcataagagtcctcgtcttatgactgtcctccccctcaagagcatcaccttctgaaccttcagctgaggtttcagtcatttgctcattcattcattcagaaatacttgctgggtgtctatcatggaccaggaccttggagacacagagatgaataaggcagacaggccctctggcttcgtggacctcacaggctggttagagggtctacttttcatatgcagctgagaatgctatggggcagtcagtgtccagcaagttaagatgggtgatcagactgggagtcccactcaggagacaggggagaaaggatactagactagaaggcgggagctggaactccacacccagcttgctttcgccttgagaacattttctcctcttttctggccttttatttttgcaaccagcaaaattaggaaactgaactagtttccctgatcggtgactgtgaagagaggtctcaaagagggtccaagcaatagcagcatcattgaaaaaagtatccatccgttccgtctgtgcgctacatggtactctgatatcagagaggctgaatctgacagaattggatgggccttaggaccttagtgtaccaggttggctgaccatcaggaccacttggagtgtattaaaaatcaaattattggctgggcgcgttggctcatgtctgtaatcccagcattttgggaggccgaggtgggcagatcacctgaggtcaggagtttgagaccagcctgaccaacatggagaaaccccatctctactaaaaatacaaaattagccaggtgtggtggtgcatgcctgtaatcccagctactcaggaggctaaggcgggagaatcacttgaacctgggaggcagaggttgcggtaagcagagatcatgccattgcactccagcctaggcaacaagagcaaaactctgtctcaaaaaaaataaataaataaataataaaaatcaaattatcaggcctcaccctggccctcaccctcagcctgggcaacagagcaagactccatctcaataaagatagatagatagatagatagatagatagatagatagatagacagatacatacatacacacatacatacatacatacatacatacatacatacatagatactacagccccacttttagagcttcttattcttttatttcttttcttttttttgagatggagtctcgccctgtcacctaggctggagtgcagtgtcgtgatctcagctcactgtaacctccgcctcccaggttcaagctattcttctgcctcagcctcccgagtagctgggactacaggcacccaccaccacgcccagctatttttgtatttttagtagagacagggtttcaccacgttagccaggctggtctcgaactcctgacctcaggtgatctgcccacctcagcctcccaaagtgctgggattacaagcataagccaccatgcccagctgagaatctatatttttaatcacactcccaataagttcataccaacaaatccatacactaactggcttttgtgatcttgaaatacagcaaatcctccaaaaatatttgtgcaatgaatgaatgaatggtcaagactcactttctcattctagagatggggaaaactaagacccaaaggaagaaacctgtccatactcaaggttgagaacccacatctgtctgactcaccctaaggttatttggcctgggaaatgatcagtatggctgttgagaacttacccccctttgacaatgacattgaccacgaatctgatgctttcctattcatcaccaaattcccatttggttatcagaaaatttctggcttctggccgagcacggtggctcatgcctgtaatcccagcactttgggaggccgaggtgggtggatcacctgaggtcagggtttgagaccagcctggccaatatcgtgaaaccccgtctctaccaaaaacacaaaaaattagctgggcgttgtggcagctgcctgtcatcccagctactcaggaagccgaggcaggagaatcacttgaacctgggaggtggaggttgcagtaagccaagatcatgccactgcactccagcctgggagacagagtaggactccatctcaaaaaaaagaaaaatgaaagaaaatttctggcttcttcactacctcacaaccacacacagtctttctcacttcaggccttagctctgactgttccctttgtctggaatctcttccctcctgcttggcctccccctccttcctaaccccattcgccagtcccctgtgaagccctcgcacactctgccaggtggggttgttctggcctccccaccccactcctccagccacttacacatgtctcttactggtactttcacactacactataactcccatttccataagctctcttccagaccatgagcttttggagggcagaaaccgtgtcttactcaacacttataaggttactacccaggtagtccagtcttggagggctgtccctaacaaaagatcaccatccaaaatatcaaaagcactgcagttctttctttttcttggtcaaacaacttgaaaggactccacttcttaaagtgccccttgactgtctcatccccttgtgaacttacactttacagttgctccttcacctccatcttcaaaactgtcctgaaaaatgccttccctctaaagtcagcctcctgtcctcacttttctctcttttttctcttcattctggatttcaccaggcataaagaaccatatggcaagactaaaccctcctcagaaacaagacaaaagagctaaacaggtcaagagagaaccctctttagcaggaacaggaaccaagtaaattttgcctgcactacccagcctgcaaaagtatcagtgagtgagagaattctgtgaggtagtgttattagcctaaatttttaagcagagaaactgaggctcagaaagaatcaccaattttcccaaggtgacacagggaattatagcagaagttgtcccccacacctgtccaaactataaacctcaagctgcatcccacccattagaccatcccagctccaccttcctcagccagggcctagataccctctgaggatgggtcttgggtccctctcctgcaggataaaagctggagccaggagtcatgcctgcaggggggcagtgcctatgtcatcgtatactccatcgcagaccgaggcagctttgagagtgcctctgagctccgcatccagctgcggcgcacacatcaggcagaccatgtgcccatcatcctcgtgggcaacaaggcagacttggcccgctgccgagaagtctctgtggaaggtgagccctccatcccaccacctcctcttcacctgggccccactgtcatggctgctcctccagcgctcttcatctcagtgactgtccctgccaagctgcccctaccctgcagccacttgcctaagcctgcaagctgggaaccattcttgcctcccactcatcacccccaaaccagtccccagatcctgtcaggccacctccattaattccacattcccttccctctctgcctacagtctctgtgctatcctggcatctccaccttcgccagtcctcctgcttctcaattattcctccttgccacctgccagaattttccaagaccagagttgaatttgcacttcttaaaaattcctgtatgtggtggggcatggtggctcacaactataatcctagcactttgggaggccaaggtgggaggacttgcttgagcccaggagtttgagaccagctttggcaacacagcaagaccttctctctacaaaaaaaattaaaaataattttagctctttttttaaaaaaaaattctggccaggcccagtggctcacgcctgtaatcccagcactttggaagactgaggcaagtggatcacttgagatcaggagttcaagaccaacctggccaacatggtgaaaccccatctctactaaaaatataaaaattagccaggcatggtggtgcacaccagtaatcccagctacttgggcagctgatgcatgagaatcacttaaacccaggaggcagaggttgcagtgagccaagaccacgccactgcactccagcctgggtgacagaatgagactctgtctcaaaaaaataataatttcctctatggctcccctagccccttaatcagagacactttatccaccaggatgataggcccagtgcctacaggcttttcaagggcttacatttgagaactgaaaagaaccattattggctccaaaatacagtgaaaaaaattagaaattcaaatttctcaaagctttaattgtctgcaaaacatattttgtcaaccagtaactacaaaccaaaattttaaacgtcatatatggcttgtatttacaatgggatggggactattttaataagtttgacatatcagatagggcccataacaatttttcaatggtcttactcacagagtaaaatctaaaaaaatgtgtaaactgagacccagaaaggaaaaagctagtttcacagtcaccagcccctgaggactagaactcgggctcagtggctcctggaggtggaagaccctatgctttgtgaacagacatccaaaaaaaaaaaaaaaaaaaactgcaacataagccccaggagattttgttaaagcacagatttccagacctcaacccaaacctacagaatcagaaactctgagggtgggtccaggaatctgcatttaaacaagctcctccaggtaattccgatccacagcaaattagaccctttacctggcattcaataatctgacccctccctgaccccagcctctctgtcttccctcaaagaccagtctgatttatctgagtccccagacagcagcaccaggcatgagcacaggaaaaattgcttccaatcgagactaaacacatctcttcctacctttttctccgccttccgttatggctccacccctcctcgccgggccccgcccccttagagggccgcgcctgcgctgtggtgttcgactgtaaattcatcgagacatccgccacgctgcagcacaatgtggccgagctcttcgagggcgtggtgcgccaactgcgcttgcgccgccgggacagtgcggccaaggaacccccagcaccccgacggccggccagcctagcccagcgcgctcgtcgcttcctggcacgcctgacagcccgcagcgcacgccgccgggcactcaaggcccgctccaagtcctgccacaatctggccgtgctctgaagccccccgcccttctgagagttggcgggtcactgaggtgcattctgggctccagggacgccactgcggggcaaaggcgccgttacctggagtctgcatcatgggtcttgcttgcctgctgccctgatggcctgagcatcccccagatccaagcctgggggatcccgggaaagcgatggacagacagacgatggggccgaagccccaagctgggcacaaagtagttttttacgtggtgggtgtctttttgtaaaaaaatcttccttgtccctgggctctggccaaccctcagaaaccctcacaataaaccagaccagaaggatgtcccatctgaatgcccagacctctccatctcggctcttccaggcgtctccacctactgccctcccatctacacttgactgtagactggtctggcctgctggcctgggcgtcagggcgcatcaataaagtacttggaccagttttgtgctcaggcccttctctcaacagtggatcacaaccacagttccgtgaccagctactttctcattaacccatgttttacgttctagattcacatgtctggaaggacctcagtactcatcctggcaatagaattgctggcgtttgttgggagctgtgtactaagctgtcacaacaattattcctcccaacacctgggagaagggtttccgattaaccccattttgctcgttagtaaactgaggcagaggacaccgaaggctcacccaagatcatacagctgctatacgcgaagttgccgggattccagcccaggcttgtcagactctagtgaccaacatatccattgtccactttaaacatgatacaaaaccctatagaatcttggcaaaacgaatttaaaaacataatttcgcatccaatttaaaggaggttggggcaggagctctatgaaactcaatgcattaatccccgggatggaccccagtttaatccaactcactcatttcccgaaggcagaaacaagcctagagaggggaggtgagcatgccagagtcacccagccagggaggattacaccccagggcccagcctcctcctgggtctccctttggctgtgcgggaggaaggaggtggtgaggcgtccagcctggctggggtcagggctgggtgttggggatcaggtcaggagtttccagcccgaagggaaggggtgtcactgctttgagaagaaaacaagacgcaaaccgtttggaccatcgtgtccctgacgccggacatcccttcccccaactatcccagacgccccagccccgggggacgcggtgcagagaaagaccgcagcacccgccagccagccagcagcgtcctccagccgcgaatccccgcaccccagccttccaacggggatggatggcactcactcccacaccccaaccccagcctggggaagggaaaagaaggaaggtcttcccccaccccaagctgtctccggcctgcggtcagggggaggggctctagctgtggaaagttggcagaggcggccggcagcagccgggagagtggaaaaaatgatatcaaacccggaaaaatgcaggccggatggagggccggagtgggccctgggaggtgagagggcgggagggaagtggggagggggaagagctgagaaaagaagaggggccagggagacagtgcaggagctggctttagaaaactgagtacaatcgccctcatcccctcctttcttcatctacaagtatttattgagggcctactaagtgccgggcacagtgccaggctctggggagatgtggtgaacagaaagagggagctcactgctcggtagctcacagtagggtgggctgggagactagaaaacaaatcagcaaataaaagaatcacaaacttataaggagctgaaaattagagtggtcagggaaggacctgaagataatccagtccaatcctccatcctcagataggaaaactgagggcgagagagagagagacagagagagagagagagagagagagagagagagagagagagagagagagagagagagagcttaccccaggctactcagaatgtggaagaaatacttgagaacgggataagggaggaaagggggagggaagaaagaactggtgcagaccaagatgggaaggtgggaggtgttgagggaaggagagttatgcagctagcacggcaagatggcagggtgattgagggcactgccctgaaccagggggtgtgtgttcaaaccccgctcccctccatctctccatgccttagtttctccatctataaaacaggattcatgacaattctttcctttagggtcgatgtgaggattaaatgattcaagttgtgtaaaatgcttaagacactttccgtgtctaagaagattcaataaatgtgggctcccgctagcatatcttctttttttaaaaaaaaaaaaaaaacagggtctcactctgttgcccaggctggaatgcagtggcgcgatcacagctcgctgcagcctccacctcccaggctcaagccatcctcccacctcagcaccccaagtagctgggactacaggcacatgccattatgcccagctaattttttttttttttaatttttagaggagacaaagttttgctgtgttgcccatgatggtctcaaactcctgagctcaagagatgctcccacctcaacatcccaaggtgctgagatttcaggcatgagccactgggtctcaccctgctatcatatcttaaggccttgcagaaaccaggatttgttaaaggtaagatattctgagactgtgaagacctgcttatgagtctctgcctggcatatgtattcacatgtttttgtctgtctgccccacaggaatgaaagctccttgagggaagggccctcagtgctgctctgatcccagcacctacaacagtgcctggctcataataggtgctcagtaaatatttgttgaatgaattaattcattatccattaatagatatccattaattcattatccattacctgtaaagtggcccttccaatcctgtcctctctgattctaggtgtctgtgaataaggaatggaaagcatgtgagaaaaccacactcttcctcagcctattatagtttaaaaagtactttctcatccataaaaacaaaaccaaaaaaaaaaatagctaactttgttttaactgtttctctgtgttaatgttgggccccatgctacatgctgggtacacattttctcatgtcctcaccaccacaaccctctacttaataggtactgtttaatagatgaggacacagaggctaagaaaacccaagaatctctccaaggctacacagcaagaaagggccagatcaatggtggagaggcaggcaggacctgccatcttagttgtacaattagggaaactgagactcagagagaggagacgagttgtccaaccccaaagttatgtaataaacagcaagcagttagatcactcttactatgtaccaggtgcttcaggtgctgtcctaagtgtttttcatacattaatcattaaatcctgaaaaaccgatcctattatcaccaccccagttttcagatggagaaacttgtagcacagagaagtgcagtaccccaccaagattgcacagttagcaagtagcagaaccagaattcaaaccagggagatctagctcacagcattaagaggtggggtgtgttacaccatttgtttgtacagcaagcctggaacaggctggtataaaaaggaaggtgtctttgtctccagccctgctgcctgaggtaggggcaagatagagaacaaaagcgcattgacagcatcctcagctgccagctgggactttccaccttgaagggaggatactgttatggaaaaaatgataaagctctgggaagatggatgtctccccaggggcccccaagcctcctcagagtccctcctcttgctgtgggggagggccacaaactgtgctggcctggtccagatgagacaaaggccacctggatcccaagacacccagccaggctgctcgaatactgaggatcactggccttggtggaaagttccaatttctcaccccaggcatgaagcttctgctcagggacccccgagaaatcaggttcaggctggagctccctgtccttggagatgggaaatacacatctcatagggcccgctctctcctttcttcattcaacaaacatggacaaggatgtgggctctgaaggaaggtagagaatgtagagaggatcacagctggtgggtacaggaacttccaagtccctgccctggccacgaagggaaggggagggtaaaagagggttagaagtagtgaaaaattcacctacaactgctttgtaatgattaagaatccctccggtctgtcatgaccatatgaccttaggcaaatcaaaatatacagagtgaaggggttagcatagaattctctatgtaattgtctctgtctccagaatatttaaatattgtagttcaacagcttgaaaaaatatacaagttcagtttcaatttgagcactgttcccttctgttcagttcagggttcagttaaaaataatacgaatgatgggatgggagctctgggtgcagcaatgtgtgtggttttacccagttccatatggttcaagttcaaggctaaggtttgtgtgtatgtgtgtgtgtgtgttgtggcttatattcccatccattgtggatgtgacaatttattggtggaaaagcacaggctttggaactagaagaaacctgtgtttaatcccacctcaagcacttgatctctgtgtgagctgggttctcctttccttcgttttgaaatgagaggtgataattcttatcccataggattaaatgaagtttttagtacttaagaaagaaccactatatgccattggtaatttacttcccctctctaggcctcagttttctcatctggaaagtggggatattaatagtacttcttggccaggcacagtggctcatgactgtaatcccagcactttgggaggccgaggtgggcggatcacctgaggtcaggagttcaagacaagctggccaacatgttgaaactccatctccattaaaaatacaaaaaaagttagctgggcatggtggcacgtgcctgtgttcccagctgctcaggaggctgaggcaggggaatcacttgaatcctggaggcagaggttgcagtgagccgagatcatgcccctgcactccagcctgggcgacagaccaagactctgtctcaaaaacaaaaaaaaaaatagtatttctcactaagggtcgatgtgagaattcaatcaggttggctatttgttagcatgatgctttgcactcagtaagcactcaataaattgtaatgcatttccatgcattactttatactttttcccacagatatattttgctaaggcaaagtattggatgcttttaaacatcatactatatgtatccttcagctttattatttttcacattcaacattatatttatgagattccttgtgttgaaatctgtaactattctttttcatcactgcacagtattccactgtatgaacatataagatttatttatcttttcttcctcttgatgggctttttttctgctataaataatgcactatgaacattgcatgtgcctctttgagcacaaatatgagagttcctctttccatctttccactctgccatcttctgggtctcagcttgccctgggatagctacccttagggtcccaatatggccaccccagtttcaggcatgaaacgtggacatgacaaggtccaggcaaagcaaaaaggttgtctcttcctcagcatgtccctttcatcagcaaggaaactcttccagttctcactggccagaatctggttacatggccaccttcaaactaatcagtggcttaggttaatcagggtttgcataaagtacaacatgaccacaccaagaagaaaagctagagctgggttaacaccccaagtgctctagtcaggcagtcaagggtgcatgctcttagcttttccagtcttacaaaacagtccagagtgagtgtgaccattccaaatccagtccacttcagggtctacccaactctgtgaatgaggatagatgccttttcacagaattgtctggaatgaaactttgggaggccaaagtgggcagatcacctcaggtcaggagttcaagacctgcctggccaacatggtgaaatcctgtctctactaaaaatacaaaaaaaaaaaaaaatagcgagacacggtggtgcgggcctgtaatcctagctacttgggaggctgaggcaggagaatcccttgaaccaaggaagcggaggttgcaataagccaagattgcaccactgcactccagcctgagcaacagagcaagacaatgtttccaaaaaaaaaaagattgtctggaaagcaatttttgagtcttacatacacacatacacatgcacacacattaattccaaaactgaaaccaggattcactaactcaaatgctcacagagtcagaccaataatataagtcagtgaagtcaactgggtagaggacattaggcagcatcaagtctatggcaaactggaatcagctgccttgcctaaaaggaggatacgaactaagctgcctgtgactactgttggaatatgaacccagtgttgccagataccgcatgtcagtttttctaagaaaggcagagagccagatctttatgtgaagtatcccaatccttttgttttgaggcagggtctcactctattgccccaggctagagtgcagtggtgcgatcacagctcactgcagcctcaacctcccaggctcaggggatcctcctgcctcagcctccaagtagctgggccacaggcatgcaccaccaggcatagctaattttttttttctttttttgtacagtcagggtctctctatgttgctcgggctggcttcaaactcctggactcaaatgatcctcccgtcttggcttcccaaagtgctgggattacaagtgtgagccacttcacccagccctaattcttttttattttttttttttgagatggagattcgctcttgttgcccaggctggagtgcaatggtgcgatctcagcttacagcaacctccacctcccaggttcaagcgattttcctacctcagcctcccgagtagctggaactacaagcatgcaccaccacacccagctaattttttgtatttttattagagatggggtttctccatgttgatcaggctggtctcgaactcccgacctcaggtgatctgctcacctcggcctcccaaagtgctgggattacaggcatgagccaccgcgcctggccacccagccctaattcttaaataattattgctgattgtcattttgtgtttttttgtttgtttgttttttgagatggagtctcactctgtcacccaggctggagtacagtggcgcgatcttggctcactgcaacctctgccccccggattcaagagattctcctgcctcagcctcccgagtagctgagattacagacacctgccaccgtgcccggctattttttttttttttttgagactgtgtctcactctgttgcccaggctgtagtgcagtggcgtgatctcgactcactgcaagctctgcctcccgggttcacaccattctcctgtctcagcctcccaagcagctgggactacaggcacccgccaccacgcccggctatttttttttttttttgtatttttagtagagacggggtttcaccgtgttagccaggatggtctcaatctcctgacctcgtgatccacccgcctcagcctcccaaagtgctgggattacaggcatgagccaccacgcctggcctaattgtgattttttttttaaaccctggtgcctgggcacggtggttcacacctgtaatcccagcactttgggaggccgacgtgggtggaccacttcaggtcaggagttcgagaccggcctggccagcatggtgaaactcagtctctactaaaaatacaaaaaattagccaggcatggtggcaggcgcctgtaatcccagctactcaggaagctgaggcaggagaattgcttgaactcgggaggcagaggttgcagtaagttgagattgtgccactgcactccagcctgggcaacagagcgagactccatcaaaaaaaaaaacaaaaaaaaaacaaaacaaacaaacaaaaaaaacagcttgggacgggtacagtggctcttgtctgtgatccgttcactttgagaggccaacaccagtggatctcttgaccccaggaattcaagaccagcctgggcagcacagtgaaaccccatctctacaaaaattacaagaattagccagatgtagtggccacacctgtagtcccagctacttgggaggctgaggtgggaggatcccctgagccctcgaggtcaaggttacagtgagccgtgatcgcaccactgcactccagcctgggcgacagaggaagaccctgtctctaaaaaaaaataaaataaaataaaagggaaaagttcagaataggttttatttttatcaagcaggaaattgttctaccagaaatttccctttgcctcttgctaccccaaacaagacggcttctatgaacgagggagaagtgggtgaaggatgtcagataggcaacttcggtatttgccagagaactccttccatcctcttcccagtcccactgcgctccctggaggtactcaccattaacagtttgggatatatcctggatatttttcattccacttacatatacattgtagaaaataattggccacttttctttcttccaccctatcagaattgcaattttgctctgttgttctcctcttatctatggaatcaagaataaatcctgattgctttacgccagagattaaagggggacctacagtccagctatggccaatgaagtgtgatgaaaagttaactggaggtttctaggaaaagcttctttgctcttagaaaagagcttaataaataaataaataaataaaagagctgcagcaggaagagaccagtccctttttgacaggtccctggagtgtaggaatgtaatacctggaactgtagacaccatcttgcaattatgatgggatctagtcagaggatgacaaggcagaaagatggggagtacctgaacccttgctgatgaagtcaagcctctgaacaccaaccttggcgcttccccatttctagacttactgttatgcaaattttcttgaaggatttctgggccaggcacagtggctcacgcctgtaatcccagcattttgggaggccgaggtgggtggatcacctgaggtcaggagtttgagaccagcctgaccaacatggcgaaaccccgtctcaactaaaaatacaaaaattagccaggcgtggtggtgcgcacctgtagtcccagctacttgggaggctgagacgggagaattgcttgaacccaggaggcagaggttgcagtgagccaagatcacaccactgcactccaacctgggcaatagagtgagactctggctcaaaaaaaaagaaaattacggggatttctgtgccaaagtctaaatcatccatctgatatgcatgtatgggtttgtttccttttttcacgtaagtgggattatagccatatgcattaagaccgaattccactgcaaatccaaaatagccgtgatagaaacagatagaagggcacttctctcttatataaatgaagtccacaagcaggctgtccaagggtggcatggcattccacaaggcaggaactgtgcttgcttctatcttctggttccctcatcttcagtacaatatgctgctcaagcagcagccatcatattcacattccagccagcaggaagcggtaaggagtcaaaaaaggcacagcctttcagaagacacacacctctgattacatcacgttggccacagcatagtcacatggcctcacttaattgcatggaaatttaggaaatgattttgtgatgttttttgtttttgtatttgtttggttggttggttggctggttttgtttttttgagatggagtttcactctgtcacccaggctggagtgcagtggcaccatctctgctcactgccacctctgcctcccaggttcaagtgattctcctgcctcagcctcccgagtagctgggactacaggcagacaccaccacgcccgactaatttttgtatttttagtagagatggggtttcaccatgttggtcaggctagtctcacactcgtggcctcaatgatccacccgcctcagcctcccaaagtgctgggattataggtgtgagccactgctcccagccaggaaatgtattgtattctaaatagtcacataccagctcaaaatcagggattctgtgtttatggaaggaggaaatagatattgggggacaagtcagaaaaaaaaaaaaaaggaaagacattgagagataaccagcaatcaagggtcaaccagtaatctctgctacaatgccgtacgtatcggttaatatgcttttttcactcaatgtgtactggctttctatccatgctttattcttatacatttcccttgttatttggggggttatattgttcttatttttctatcttcttcagatagaaacctcaatcatttatttgaggcctttcttcttttccaatttagcattgaaagctataaattgccttccaacactgttctagatgcatcccacaaattttggtatgttgtgcttttcattatcattcagttcaaaatattttctaatctcccctgtgatttgttctgattcccataggttattccaaagtatgttaatttcaaaatatttgggggttttccatttgtttgtttatttccactgcaaatttgagacttaataattcaacatatggcccatctcgatgcatgtttcatgtgcacctgaaaatactatgtattctgccattgttgggcataatgttctaaatgccagttaggtcaaagaggttgataatgctgttcaagtcttctctatgcttagtgattctatgcctacttgttttatcaattactgagaaaggagtgttgtatgtgactgtttctccttccagtctgtcagtttttcctttacctttttctttttcatggctgtactacttttctacagtatggatgtaccataacatattttacccattgaggggcatttaggttagtgcaaatgttttgcccttcacaacagtgtgacattcaatatttttacatgtatagaagagattaccaaattcaaatttactagtcaaagggcacatacgttttaccttttgacacaccctgccaaattgccctccaaaggggctgttttgtttatattcagatgaattgtgccaaattccctactttgtgacccacattagatattaccagtctcttctcatttgaccttttattggggacaagatgagagaaagtaggaaggaaggtgtctcattgcctattttgcttttccctaattataacaaagttgagctgtattctgctcaatgactgtgccctttagctgcccaaaaccacagtgaagctttgaaattacagcttttaagggctgcattaaattctgagcctagactatttcattctttattctctgcctggggtagaggagggtgctttattccagttaccagagcctcggtatccagttactgatactcttggtatcagcctagagtcctgattccagaacaggaaatctggcatcagtcaggtctgaatttgaatccctctggctcagccatttgccagctctgtgaccttgggcaagtaacttggcctctctgaacctttggacagtcagttttacaaaggaggatgacaagcactttgcataggtgttatttagattagaaactgggtgtgtaaagcacctctcacagcacctagcacctagcagtcattaataacaattaaattttttaatagccattcattgggcatttgacacgtgaagagcactgagttaagcccttttcccaggttatttcattaatcctcacaacagtaagagataacactattctacagataaaagataactaagactctaagatgttaagtagcttgtccaaagtcacacagttagtaaagatcagagctaaggattaaatcagaaatgtctggcttctaactaagcctgcttcccagggtagctggcttattcgacagatcaagaaaatgaggcccagggagaggaaataacacatggaatgaagtggtgagcgagcagcagccatttgaagaaatatccctcttccttctgggtctgggtgaccagctggagaagagactggagagagtggaggaagggacagccacccagcagaggaggcaagagcatggaaaatgtctctttcagccaattttcctgaggaaccctggctgaggctcagggctgggaatggaaagtgtgcagggaggaggcgcagccgcgtccacccggagaaactgtctgcaatgtcctgccgggagaggccagggggagggaactgctgggaccgcagtgggtgaaggagccggaggggcagatccgggaggatgaggatctggcatctgtccagggccaggtctcctgggagaggaggggcaggcattccccgagctccctgcttcctccttgggctccccggctctgccaactcctgctgtgccctgcccatgaatctgggcatcaaccactcctggaatggagatgctggcaaactcgactctctggggatgcgcacagctgactcagggagggtgcggtggccaggaagaaggatcgatcctattctcagagatcttcgccagggctggttaagatctgagagccatcagccacatcaaatgcatcctgatctctatgacatcagtgcggtccctctgcctggtaaatctcctcttgctactcacaatgcccataattccaccattatggatacaaccaaggctcttgttcagtatacaaaggtatggtcatactaatcattaaaatatttaaatgcattcctactagttggtaataacccatgccctgagtgtcctccaagtaccaggtataacagaccctccaggccttcctctggaagcctccagggcccctccccttaacagccattaaaggggtagtacccttaccacggcagggccacccagggctatgtggatcatcagtaagtgatggtcacaaccattattactacttttcatatcactcctggaaacaaccctttggatcacaactttgtctcctgtttaaaggcaaatggtagaaatttagaggtgaagaggccctgtgcaatctcttcatctttcagatgaggaaactaacgcccagggagaagcagagacttgcccaaggtcacactgccaggcagtgtaaaacaaggtattagaatgcaggtccctgactcctgacacttcctttaggtgtcagtttatctggaccccacacactgaacttgagcaggtaatggaaggaagtgatggggagggacctgtctcaagaaagaagtgagaaccaatcatttggctctttacctggtcaccatagtcatggcaacagtctccttggtcactatctccttagagatagttgccatggcaaccactaccccggggcaccaactttctgacacccaagagccttaagataaaccagaagcaagtctgttccatagcactaacccatatcagagctccgagtaggaaagagacttgcccaacatcacacagcaagctggcagtgaagtcaagcttcctgagtcccccacccgaggctctcacagcagccccaccctctctacagctgacaccgcccctcccccacctatccccatttttctgcctgctttggtgcttcccacattcctccagccctcagtcaggatctccttcccacggcatctcacccttggctgcctgtcagccagcccatcctcctgggaacaggctgacatgagttttgtgtaggactcatcgcaggggtttgcaacattggctgaggctccctgaagaccaaagagccttcaacatcctttgccctccaaaggaaataatctccaatggtggaatttcaggctctatgctcagaactgagtagctctttttggggggtcgggcccatccgctgtgtaaggcagaagttgctgccccactctgagtctagaatcactccgagtctgatcccctgttttgtttttatcaagtcccttttcctctctgggactcagtatccccaccaaagacaaggggatgaggataccgttctacagtcaccaccaccaccaccatcagaagactgccagagaccagacgcaatctagtgtttcagtataaccaaacaaggaatggccatggtttaaagaactggcctaccttcccgctatcttcttttagaaaaatggaatctcaggattggaaggatgtcccaggcacagggaagatcttgagcaaaagcagggaggctgaaaagaatctagggaacctgtgactacctagtgtgttgacgtgtaaggataaagagaaagtagggcctataatcccagcactttgggaggccaaggaaggaggatcaattgagctcaagagttcgagaccagcctgggcaatacagtaagaccccacatctaaaagaatataaataaataaataaataaacacagagaaagtagcctagcaggacaagccagaggagattaaaagggatcagtcaccagtcccagggctaaggacgttgtctctgacgcctcctttctgtccttctgttcctgccctcaaaagcaatgagcaccaagcatttgcaaactccaagtctcagggcttcagggactcaccaaagatgctgaggcactcccctgcctgggtctaacctgtgcaattctgatactgtgggatggaggggatggagctgcataggttgaagggcaaaagagagcaaggagcactgcaggaaatcatccactcatccattcatttgatgaatatttattaaatgcaacccaagcttgtgaccttgggcaagttatttagcctgtctgtacctcggagtccttgtgtgcataatgaggacagtggagatgcctgccccgtacgatggtgtgaggatcaagtgagtttgtaaatgtttagtgcagtgcatgggaagcaaatcagtaccccatgcatgtgtgttataattataatgattactgaacatttactatgtgctgggcactctctagacagtagaagtactgggtgaagttcagtgtgaacacaacatgcataatttctgccctcaaggagttcacagtctaataggagagacaaaccaaaaaagacaactttattaaaataatacaaagaggccaggcgcggtggctcacacctgtaatcccagcactttgggaggccgaggtgagcggatcacctgaagtcaggagttcgagaccagcctggccaacatggtgaaaccccttctctactaaaaatataaaaatcagctgagcatggtggcacacacctgtaatcccagcaactcagggcgctgaggcaggagaatcacttgaacctgggaagctgaggtggcagtaagccaagatcataccactacactccagcctgagcaacagagcaagactccatctcaaaacaataataataataaaaagaattacaaattattgcatcagatctaaatcttaacctccaaactcaagtgtgcaagaaatattcatttttttattttctcaaaaagcaaattctactcctatcccctactcccatccttctgggctgcatggaaattcagtctccatccttactgaagccactccatgacaagaaacaaggagggaagacagggactccgcctggcactgaaccacgtgaagcctctgaccacggtgcccaagccctcaatagcccctgaaatccagcagcccctgcaagccaagccaagcgaggggcctgggagtcttgctggaggctggaatcaccaggcctgaatccagcctccccaagcacaccacctggccatccccacagtctagccacctcttcgggtaggagatctccctgatcctggactccaccaaccttcatggcctctgacacctcctttctgttcttctgtttctgccctcaaaaacaatgagcaccaagcatttgcaaactccaagtctccaggggccaagcagatagcaacaaaaaaaagtatgagacttggtgacctgagagcacatgccttgcctaaaaaggttagcataggccaggtgcaatagctcacatctataatcacagggctttggagcaggaagatggcttgaggccaggagttcaagaccagcctgggcaacatagttagacattatctctaccccaaaaaaagttttttttttttcccaataaaaaaaggtcagcacaacttagcttaccaaacttatcaggtaatgtagcctcgtggttaggggctgcattctagagctatgctgcccaggttcaaattctggtgccactctttgctgtctgtgagtccttaggcaagtcacctaacctctctgtacctgtttcctaaactatgaaaaagaataatacttgtggccttgtgcagtggttcacgcctgtaatcccggcacttcgggaggccgaggcagacgtatcacctgaggtcaggggctcgagaccagcctggccaacatggtgaaaccctgtctctactaaaaatacaaaaattaggctgggcgcggtggcttacacctgtaatcctagcactttgggaggccaaggcgggtggatcacgaggtcaggagatcgagaccatcctggctaacacggtgaaaccccatctctactaaaaatacaaaaaaattagccaggtgtggtggcgtgcacctgtagtcccagctgctggggaggctgaggcaggagaatggtgtgaacccaggaggcggagcttgcagtgagctgagattgcgccactgcactccaacctggatgacagggtaagactctgtctcaaaaaaaaaattagccgggcgtggtggcacatgcctgtaatcccagctactccagaggctgaggcaggagaatcacttgaacccaggaggcagaggttccagtgagccgagatcacgccactgcattccagcctgggtgacagagtgagaccctgtcccaaaaaaacaaaacaaaacttgtaccggtaggtacggcagcttcacatgagaaagcacttaggacagtgcctgacattagtagttactcagtaaatgttagcacccatcacaggaaaatacagggccaagacttccagacctactaaatgttcaaaagaaagcaactatccaaatttttattctgaaactgctccattttttaaccttggtagctaagtaaacccagatttttgtttctgttttgttttgttttgttttgttttttagagacgatatctcattctgttgcacaggctggaatttagtggcacaatcatagttcaccacagcctcaaactcccaggttcaagcaatgctcccgcctcagtctcctgagtagctgggactacaggtacatgccaccaagcctggctatttttttttagtgttttgtagagaaacgaggtcttgctatgttgcccaggctgatctcaaactcctgagctcaagcgatcctctcacctcagactcccaaatagctggaactacaggcacaaaccaccaccatgcccaaccaaagccagtttttaaaccttggcaaaagtcatacaaaacacatctgtgagcaggactgggcctataaaactgacaatttacaatatctgctctacagtgtttaagcttatagaaagtggagtccagaaagggaagagtcttggaagcagcttttgctttgggccctagaaccaaacctcccctaggcaagagggtacagaaaggggagggacaaatagagagagaaagatgcaaagtattaataatacatcaaatcaccctggtacgtaaatgctatgtgctgtgagggtttgtttgccttttaagtaactcagataaagatagaaaagtggtcaggggctgggtgcggtggctcatgcctataatcccagcacgttgggaggctgaggcgggaggatcgcttgagcccagaagtttgagaccagcctgggcaacacagtgagaccccatctctactaagaatacaaaaagtagctgggtgtggtggtgggtgcctgtagtcccagctacttgggaggctgaagcagaagaatcgcttgaacctgggagatggaggttgcaatgagcgagatcgtgccacttggaaagtgagtttgaaactaggacccataagaaggagctaccttaataataataataattaaaaaaaaaaaaaaaaagcagggagagagaacaccaggcaggggacacctatacaaagggtctgaggcagaaaagagcttggatcgcaaaagaagatgtgcaatgaatgagctggacaactaggccatgctgaagagcgtgaagttatcttgagggcaggggcaccggggagtcatcgaagggtttcaagcaaagagatgcaatgtgcaggggactccaggagacaaattaggaagctgctgaagagcccaggagagatgggctggcttggattggccagcagccttagatatgaacagccccaaatttctgtggctggaattggccttaaagtcaaagactgcatttgagcctcagagtggcctgctgcctccccatgagccaggtccaagtggtggccctcatcccagtgttccggcccggccagaacccggccacgtagcggggactgtctgttaactggcttatgctgccctctgctggcaggagagggcacctgagcaaggggagctgcagcctcccaaagccaccacggtgggtcaacagcgcggtggctcacatctgtaatcccagcactttgggaggctgaggtgggtggatcatctgaggtcaggagttcgagaccagcctggccaatacggtgaaaccccgtctctactaaaaacacacaaaaaaattagccgggcatggtggcgctcgaggcaggagaatcgcttgagcccaggaggcggaggttgcagtgagctgagattgcaccactgcactccagcctgggtgacagagcaagacaccatctcaaaaaaaaaaaaagaaaaagaaaaaaagaaacaactccaggtggagacagggacggtgcctccaccctacccatcttccccatctcaggtcctggcacatccatcatgcagtaggtcagctcagaaacccaagacacagtcttcacacttcctcctccctcacatcccatcagggagtccttttcaccctatttcctaaacacaatcctcaattggaaatatcctagatctatcttaatcctgtccacctctctttgtctccattgcccccactcccagtcaaagccacaaacatcacttctttagtctatttactcacttttactcttgtcctggccaatccgtttcccactcagcagccggagtcctcgtggtgtcctctgattccaagatcctttctcctcagtgtttgagccggatggggacatccctgagaaatacacagccccacccaccagggcaccctgtccatgtagaaaactgtcctgaagatgcaagacaacagaggtgctcacatcagagccccacaaacaaggcacttggccaccctcctactgggaatgtttccccgtctctactggtgtcccagcctcatgccatccatctcactggctcctctccttccacatcctcagctccatttcttttttttttttttttttttgagactgggtctccctctgtccagactgggagtgcagtgatacaatcacagctcactgcagcctcaacctcctgggctcaatgatcctcccacctcagcctcctgagtagctacagacgcgtgccaccacacttggttaatttttggttttttgggttttgtttttttggtagagacagagtctgtgtgcccaggctggtcttgaagtcctggcctcaagagatcctccctcctcagcttcccaaagtgttgagattacaggtatgggccactgcacccagccgccgctcccttatatttctgtctgctacttctctccttcccacaaattcctgttcacctctaatgcaaagcagatttgccatttcagccctgccagccagggtgcttagggctcacattttcctcaagcaggttgccatggtatcttcgtgtaatgtacatatatatatactgtcccctccctaggaaaaataccagtatcaggacaacagcatttttacccagatacattgtgaggctagcattcattctatgaccctgacgttcatcccatgaccgtcgattttttttttttttttttttgagacagagtttcactcttgttgcccaggctggagtgcaatggtgcaatctcggctcactgcaacctcctcctcctgggttcaagtgattctcttgcctcagcctcccgagtagctgggattacaggcatgcgccaccacacccgcctaattttttgcatttttggtagagatggggtttcatcaggttggccaggctggtctcgaactcctgacctcaggtaatccatccgcctcggcctcccagagtgctgggattacaggcgtgagccaccgcacccggcctgacattcaacatcttatggcttggtctgagattatggaaatcctcactgacctcaggttcagcctgtgtaacagaagcctcaccacccaccccagaggcctttgagagtagaactggacacccttcaagactcccctgaccaacttgagccaaggaagctcacagatctgggagcttctaggttcctgcagcaaatcataacatgttaactcagttcctgagggctgctgtttgtagcaagcctggttttctgtgaaagagaatgaagacaaagcagataaaaacagaaaggagatgcagagagaggatcctggcagcatggacatcctggcttccaggggttagtgaggcccaattccatccctgcctgtccttgcaggggtttggttattcacctcttccttggagttcaagaggccaatgcattccagccttcgcctaaagcgtttcaaactgtgcttccagcccttgcaaatcacagaaccctgagtctgtcagaggttctctctctgacacttcccattccctttgcaaatctagcctccatccccaactcaacaaagaacaaagggaactctgaaatgacaattttctcttaaagtcttcaattttcccttttgttttctattttgaaaggagcagagtgacaagttcattatactcattccttcctcctagcctatcatcaccattttccaaaagggcccggctttattttacttccgtacctatttttttgttgttttaatcccagttgccactctcattcccaaccctctataggcaaccattccaatgtgcttgacgtacattctttaatatgtaaatgaccttgttagatttgctatgtagacttctgatatatacctttgtcagaggtgcttgaaccagagcaactccatcttgagtaggggctgggtaaagttaggtggagacctactgggctgcattcccaggcagttatgcattcttagtcacaggatgagataggaggtcagcacaagatacaggtcacaaaaccttgctgataaaacaggatgcagtaaaaaagctggcaaaaacccaccaaaaccaagatggcaacaaaagtgacctctggtcctcctcactgctcattaaatgctaattataatgcattagcatgctaaaagacactcccacccatgccgtgatagtttacaaatgctatggcaatgtccagaagttaccctttatggtctaaaaaggggaggaaccctcagctccaagaattgcccacccctttcccagaacactcatggataatccactccttgtttaatatataatccagaaataactataaatatactcagtcaagcagcccatgcagctgttctgcctatggagtaaccattctttcattcctttggttttttttttttttttgatacagagtcttactctgtcacccaggctggagtgcagtggcgcgatctcagctcactgcaacctccacctcccgggttcaactgattctcgtgcctcagcctcctgagtagctggaattacaggcatgcgccaccacacccagctaatttttattacagatggggtttcacgttgttggccaggccggtttcaaactcctgacctcgtgatccgcccgcctcggcctcccaaagtgctgggattacatgcctgggccaccacgcccggccgtacattagctattaaaaaaaataaaacatagaaaataaaatctcctttatccttcaagatttggttcaaatgcccactccactgggagcccttcaatggcagagactgctgttgcctcctaacttccattctcctcctctttcattgtaagaaaactcctgcactctgcagcttggcttttttttttttttttttttttttttttagacagagtcttgctctgtcacccaggctagagtgcagtggcacaatcttggctcactgcaacctccaactcctgggttcaagcaattctgtctcagcttcctgagtagctgggactacagtcacacaccaccacgcatggctaatttttgtatttttgtatttttttttttttgagacggagttttgctcttgttgcccaggctggagtgcaatggcgcgatctcggctcaccacaacctccgccacccaggttcaagcaattctcctgcctcagcctctcaagtagctgggattacaggcatgcgccatcacgcctggctaattttttttgtattttgaatagagacggggtttctccatgttggtcaggctggtctcaaactcctgacctcaggtgatccgcccacctcggcctcccaaagtgctgggattacaggcatgagccagcacgcccggcctaatttttgtatttttagtagagacggagtttcaccatattggtcaagttggtctcaaactcctgacctcaggtgatccacccgcctcagcctcccaaaatgctgggattacaggcgtaagccactgcgcctggcgcagcttggcatatttttttttaaaagaaaaaaaataatattccatttttatctaggcaattgcaagatttccaataactagcttaatgctgtcccactaatagagtgcacacagcctcccttgtggctaaacatgaccaggtaattatggtctggccaattaaatgtaagtagaagcattatatagaactcctggagtgattgtcagaggggaggggatgaaaactcttttgctctttcctcctccttccagactacaatttgaacaaggtgtccagagctttagcatccttcttagatcatgaggtgaccttgaggatggaagtcctatgctagaacgatgaatacaatagacagaaggagctggatccccgatagccatggagctgctgtactggccctgagctgcctgactccacatttctttaaattcatctgttttaaatttttttttttaaacagactctcactctgtcacccaggctggagtgcagtggcatgatctcggttcactgcagcctcctcctcctgggttcaagcaattctcatggctcagcttcccgagtagctgggactacaggtgcacaccactatgcctggctaatttttgtatttttagtagagacagggtttcaccattttggccaggctggtcttgaactcctgagctcaggtgatccgcccacttggcctcccaaagctttgggattacaggtgtgagccactgcgcctggcctctttaagttcatctgttttaaattgttgttatttggaggttttctgttgcatgcaaccagccaaacctaatcataactgacatgttgttctggttatctattgctgcataaagaggaactcccaaaagaactattttgtcaaacttactgattctggggatcaggagttttgacaggactttgtgggcatggcttgactctgctccatgctctctggagccccagctgggaagacttgatggtttagtgtgactcaagcagctggggactgggatcatctggaggactcttcactcacatgtctggcacctggactgagataacaaaaagactggactcagctggcattgctgactgaagcatctacacatggcttctccatgtgacttgggcttccttacaacatggcagtctctgggcagtcagacttgttaaaagtggctcagaggtccttgagcaattgttccactgaacaaggtggaagctgtttggcttcttccttatttcctttttctttaatttcctctaaaatattttatcttcttgtttggcctcttctgacctcgcttcagaagtcatgcagcatcaaccttgtctgcagctgccctgagccagcagttctctacacacccagcatcagcatcaagtgagatgcacccagcacggttggagcaggcatgggcagagcaatggtagccaggctccagcaggggctgcaacttctggcactgctcctacggatgcagatttatacagctcaaacaactgctctaacttttaagtaacttcttccagaataacggctgcccccaagtctagcgaatgccaccaataaggcattgacagtgtcctgcagtcaacagccagtctcccccctcactcctcagggtctcactctcttcctcttctctgctgttaaaagactcaggccaggccaggcatggtggctcacgcctgtaatcccagcactctgggaggccgcggcaggtggatcccctgaggtcaggagttcaagaccagcctcaacaacatggagaaaccctgtctctactaaaaatacaaaactagccaggcatggtggcgcatgcctgtattcccagctactggggaggctgaggcaggagaatcacttgaaccagggagtcggaggttgcagtgagccgagattgtgccactgcactccagcctggcaacagagctagactccatctcaaaacaaaaaaaaaaaaaaaaaaaagtgaaactatctcaaaaaaaagactcaggccaagacaggtctacactttcccatcttctaaattcaattcaaaggtcatctagaaggccagtatggcaaggaaaaaacaagtcttcatcaaatctagtagatctagataaaataagatacaggccaggcgtggtggctcacacctgtaatcccagcactttgggaggccgaggcgggtggatcatgaggtcaggagatcaagaccatcctggctaacacggtgaaaccccgtctctactaaaaatacaaaaaaaaaaaaaaattagccgggcacggtggcgggtgcctgtagtcccagctacttgggaggctgaggcaggagaatggcatgaacccgggaggcggaacttgcagtgagctgagatcatgccactgcactccagcctgggcgaaagaacgagactccatctcaaaataaaatataagatccacatcttggttgggcgtggtggctcacgcctgtaatcccagcactttggaaggccgagacgggcagatcacgaggtcaggagtttgagaccagcctgaccaacatggtgaaaccccatctctactaaaaacacaaaaattagccgggcgtgatggcgggtgcctgttgtcccagctactcaggaggctgaggcaggaaaattgcttgagcccgggacacagaggttgcagtgagccaagatcacactactgcactccagcctgggtgacagaacaaaacgccatctcaaaaaaaaagataagatccacatctaattttattgacacagaaaatgtcaagaaccccaaatttggttggtttgaagaacatgtgaagggtttgactagatgatgaatgtcaatattaaatcagctgaagtttcatatacaaaatgaagaggaacagcattcaaacttagttaagacacaatttccttgagtggccaggcatggtagtcatgcctgtaatcccagcactttgggaggccaaggtgagcagatcgcttgagcccaggaattcaagaccagcctgggcaacatggtgaaaccccatctctataaaaaatggaaaaattagctgggcatggtggtatatgcctatagtcccagctactcgggaggctgaagtgggagggtcgcttgagcccaggaggtcaaggctgcagtgagctgtgatcatgccattgtgttccagcctgggtgacagagtgaaaatgtgccttgaaataaaattttcctttgaatacggcttaagaaatatggccacttaaaactctaccttgaaaataaatatagattttatcttatctagaggtagagtgggaagttttcatttggtacattaaatctataaggccataaacaggtaatataaaaagctttcataattcaatttatatataacatgagaaggaacttccaggtgttactatgaatcttctatgtatagttacagtcaatatactttatataagagataattttaataccaatataatctagataacattttactttgttatgttatcattgttctcttggggaataaattttttcctctgaggctctggatttgacattgaattttgtgtgtactaattgacatgtgccagggcaatgatggactggaatccacccccaaatcaaagcatcatggtaaatcttgcttatccttataaagtcaaatgatagacatttcccatcacctatttctattcaacaagagcaccagattcagttagctaatctgcttccaaagagtagaactgcattgagctcaaataatttcaaaatactgacttttttttatttatttatttattttttagatgtggtcttgctatgttgcccgggctggtctctaactcctgggctcacacgatccacccacctcggcctcccagcatgctgggattacaggcgtgaaccaccatacccagcctatttctgcgtatgttaaacatgctttacaattttaaaaatgaactgttttgaaggtaaaattacaaatcttgaaattaaaaaagcaaatatgtaaaggagcaaaaactataaatcaaacatttgagaagagaaaattggaggctaacttgtattaaattcacaaaaacttctatactttctgtaaatacttttttaaaaaactatagatcagaggctaggcgcagtggttcacgcctgtaatcctagcactttgggaggccgaggcgagtggatcactgaggtcaggcgttcgagaccagcctgaccaacatggagaaaccccatctctactgaaaatacaaaattaactgggcgtggtgacgcatgcctgtaatcccagctactcgggaggctgaggcaggagaatcgcttgaaccagggaggcagaggttgtggtgagccgagattgcgccattgcactccagcctgagcaaaaagagcaaaactcagtctcacaacaaacaaaaaaactatagatcagaataaccacctttagaacactttcggttatcagtcaatatttttagatagaagctggtagtaagcctaaagtgggcttaattctgcagtaaacaactgcctcaacacatagaaatcttttttaaaataggcactcttggccgggcgcggtggctcatgcctgtaatcccagcactttgggaggccgaggcgggcggatcacgaggtcaggagatcgagaccatcctggctaacacggtgaaaccctgactctactaaaaataccaaaaattagccgagcgtggtggcgggtgcgtgtagtcctagctactcgggaggctgaggcaggagaatggcgtgaacccggaagctggaggttgcagtgagccgaaatcgtgccactgcactccagcctgggtgacatagcaagactccatctcaaaaaaaaaaataaaaaataaataaaataaaataaaataggcactcttgcgggaggtggcagctcatgcctataattgcagaactttgggaggccgaagtgggcagattgcttgagcccaggagtttgagaccagcctgggcaacatgccgaaaccccatctctactaaaaacacaaaaagttagccgggcgtggtggcacacacctgtggtcccagctactggggaggctgaggtgggagaatcacccaagcccagaaggtagaggctgcagtgagctgtgatcatgccactgcactccagcctgggtgacagagtgagaccctgtctcaaaataataataataataataataataataggccctccttgaagttttttgtttgcacagtcacacagtgatgcttagatgttccagtatctaatatagccacagtaggctgcaagcagtggctcatacctgtaatcccaacactttaggaggctgaggcaggaggatcacttgaacctaggagtttgagaccagcctggccaacatggcaaaaccccatgtctaagaaaatatatatttttaacttttttaacaatatcaaaaataagaatcacataaataaacagattcttcaaattctgaaaagagccacaaagctttataaattgtacaggggcatgaactcgtaaggtattataattgcctggcacatagtaggctctcaatacatttgcaaactccacacacaccttactttcttttgctttatttttctctatttatctgcattaacatgctatgtaacacataactatacattaacgttttacaaattacaaatttttcttgttttttttttttttttttttgagacagagtctcactctgtcgcccaggctggagtgcagtgggctcactgcaacctccgcctcccaggttcaagccagtctcctgcctcagcctcccaagtagctgggattgtaggcgcccgccaccacgcccggctaattttttatatttttagtacagacggggtttcaccgtgttagccaggatggtctcgatctcctgacctcgcaatctgcccacctcggcctcccaaagtgctgggattacaggcgtgagccaccgcgcctggcctttttttttttttttttttttttttttttcagacggagtttcgctcttgttgcccaggctggagtgcaatggctcagtcttggctcactgcaacctccgcctcccgggttcaggcgattctcctgcctcagcctcccgagtagctgggattacaggtgcgtgccaccacgcccggctaattgtttgtatttttagtgcagacggggtttcaccatattggtcaggctggtctcgaactcgtgacgtcaggtgatccacccgcctcggcctcctagagtgctgggattacaggcgtgagccactgcgcccagcccattttacagacttttattttgttcagtttctttattgtcttcccaacgtccccccacacacactgcactaaaatgcaaacttcacgaaggcaaggaggaacttttgcctgtattgttcacctcagtgtccccagagcctaggtcagttgttggcatattgagggacattcaataaatatttaaggagtgaataaacaattggatacccaataaatgcatgtatgaataaacacattcttagttattcggaatatgaggatttgcggagagtggacagcaggggattgaggagaccggctgggactgggaaatgggcattcgggtcgcatgcccaccgcagtggcccagagcccctgtccggaccgctaacaagttgcttagcaacccgccgcccggccctcggccaccgctagagggcgagcgggcggggagacgtgcacgcgcgcgcgcgtgcgtgcaagcgtgtgtgcgcgcgtgcgcggcgcgggcttgggagggagcacgtcacttcctgttgccttaggggaacgtggctttccctgcagagccggtgtctccgcctgcgtccctgctgcagcaaccggagctggagtcggatcccgaacgcaccctcgccatggactcggccctcagcgatccgcataacggcagtgccgaggcaggcggccccaccaacagcactacgcggccgccttccacgcccgagggcatcgcgctggcctacggcagcctcctgctcatggcgctgctgcccatcttcttcggcgccctgcgctccgtacgctgcgcccgcggcaaggtagggtcagcgggaaaaccgggcactttccacccccataccgaacacggccgacatggacccttcctaggcgggacagacacctctccccggacactgactcttcccagccctgatcaccaccgttccctctgtctcgggcccacattccggggctggcatttcctaccccgggatctgggcaccgacccccgaccagggtatgataccttccccaataggaacttgcttctgctcccgacccggaccctgacacttccctccctgtgcatcatgccgcggctgggaacgctgtcagcccgtcccccactgcgactcgggcactgattgttctgagcctgttgggcccaggcagatcagccccatcatgtatacctgatggatactggtcctcacaacttactgaatggtacaatttcgtgtcattccctgttaggaaccctgcctcagcccaccgcagggccctttctaccatccagacccatccctagactctgactcctgtctcactggaatctatggcaccttatgtgctcacctagatcccccacacctggcccttgcccctgcctcaaaaacaatgatctcttagagcccagtttttcacatcactttctggaaccatcccagtcagctggctcctcagaagctggcatcttggtgcctctactttccaactaggcatggacgtcttattttcctggtttcctctcttaactaccatccaaccttggacatggcctagtcaaaacctagaccttgttcctaacctgtaacccttttcccacccagcctttgaccctatctcaaagtagcccttctccccatacccccaagacaatccccccaccaaactgggcctgtctgctgggccactgttggcccctcttgtgagactgggccagactccatccctggccttcctcaacatctgtcctattggataactaggaggactccagcacatttcaccttctgcttctccctcccccttccctgccccacttcttccctatattaagccctttctagcccgttgtaccaatgacttttcacttcctggcaccctctcccttcctccacaacctcttaatctgcaccttcccgatgctcctcccccacccagacctgaggatggacctaagtggaagtcttgcccaaagagggcaggcccacaaagcagctgccacttttgaaactgctgaagctgaggttctcaaaacactacccaacttgagcagtagctgaggcctgccatcttccttccccaggagcagagaactcactactggctctgtatgcgatcagatgcaaaggaaagtagttaggcggggcttaggctgagagactcaaacatgactccattttcctttttatttggctttttctaagctgagttcaggtgatattaagcctctctactatgcctgtcaggtagacacttagtgtagagagcagttctgagataacccaggacagaggaggcgaaggacagctggcataaggctaggcagcttgatctgagctgctctccaaactgagtaattctccctggcaccttctgtacatggatcactaatctctgcagaaaacaccttccaggcaacagtatttcctgaacttccaccactgtcaggggtaagggaggattgctgcaaagatgagtaggtcagagccctgtcaccaaggaattcgggagcgtaggtgaaagaataataactagattgtgattatactacaagcaatgctacaaggtttagggagaaagattgagcacatctgggacaatgcagggaggctttgtgctagaggtaggcctgagccttgacgtagaggtagaatttcagccaggagaaggcattctaagcaaaagaaaccaggtaagcagagagaggtacggaggcaggaggctacgaggcagttcaggaaatagtggaaggtttggtgtggctggaacagagggtatggataggagaaagccttagcctctgaatacctctcccaagcatctcctgcagggcagcagggtgtggaggactgtatgaatttacaaacaggacctgaccattaagagcctgccaccaccaatgacccagatgcggtaaagcttgcaaaaccttgacgccctttgatgctcacagcaactgaggtggcaggcagagccagtttcattatcctcattgtacaggaaaagaaactgagagtcaaagaaatgacttctgaagatcactctgccatttaggggcagaatcaggtatgcctagtcctcatccagggctctctcctaacacaggtacctttaaagacaagcagcattgacctagggaaaggacagggcaaatgactccccttctaccctgagtcgtttccctggtcatgtgaaaaggagagagaagagttagtgtggggacccagttttgatttcccaccagtgttggaccccaaaaccagttgggagagagggaatgtgaggacagaatccccaagggtcaaggtgtccataacaggcagggaaaattgtgaaatcatggagagaaagaaggtagagcctccaggagtatgttgtgaagaagtagccttgggaggagcagtctcagagcagcacccatcactgtcagagtcctatatcccagacagaagcgaatatgacccaggcagtagctgcacattaaacattggtttaaagggccctcagcgaacaggactgggtgcctgctgtgggctaggctctgggctgggtaccaggagttccgggacaaagaaggccaagccctgccctcactgagcccagtcaccaaggagaaacagacatgtgactagtcaagtaaatagagctctgataggcctcctggagggggcagcagttgtctctgcatggattgggagagtccaacaggcagagcaggagaaggtggggcaggggaccacaagatgtgttcagggaggcagtgaagagtgtggtgtgagcccaggagaggggcttggatgtagtgacaagatgttcaggaagcccgtggcctttctggggaagagaatcctgaaagcaatgcagcggttaatcgtattgttacaaaaatactatacacttgttaaaaaaaaaaaaaatcaagcagtgcagaagtataaaggaaaagcctcctgggcactattccttggaagtaacccaactggctgttgagtatataacctttgagagttttttctgtgtttacacattcattgtatatgtgtctgtgtatatagacatgtaaatttatttttataaaaattggattatatagtacatatttctctacaacttgatttttttttttttttgagatggagtttcactcttgttgcccgggctggagtgcaatggcgtgatcttggctcattgcaacttctgcctcccaggttcaagcaattctcctgcctcagcctcccatgtagctgggattacaggctggcaccaccacgcctggctaattttgtatttttagtagagacgggatttctccatgttggtcaggctggtctcaaactcccgacctcaggtgatccaccctcctcggcctcccaaagtgctgggactacaggcatgagccaccgcgcccagcaattttttttttttctttaacaatatgttggccaggcacagtggctcatgcctgtaatcccagcacttttgggaggccgaggcaggtggatcacttgaagtcaggagttcaagaccagcctggccaacatggtgaagccccatctctactaaaaatacaaaaattagctttgtgtggtggggcacgcctgtaatcccagctactcgggaggctgaggcacaagaatcgcttgaacccgggaggcacaggttgcaatgagccgagatcatgccactgcactccagcctggtcgacagagtgagactccatctcaaaaataataataataataatatgtttcattatttttctatgtcagtacatatagacctaaagttaaccagacatgatggcatgcacctgtagtcctagctactctggaggttgaggcgagaggataacttgagcccaggagttcaaggctgcagtgagccctgattgcaccactgggcaacagtgagaccctgtctcaaaaaatatatacatatatatatagagagagagagagagagatctacctcatcttttatggtggggagggtaggtaatacatgcccatggtacagaattcaaaaggtacaaaggggtgcacagtgaaagtctccctgctaccccaagctgccctatttccctcctcagaggcagcccctctcctgtgtttcttagatatccatccagaaagattctgtgtctttacaaataaataggcatatacttttccctgattttttttgttgttgttttaatgagaccgagtctcactctgtcacccaggctggagtgcaatggcataacctcagctcactgcacgctccatctcttgggttcaagcgattcttctgcctcagcctcccgagtagctgggattgcaggcacctgccatcatgcctggctaatttttgtatttttgcagagatggggtttcaccaggttgtccaggctggtcctgaactcctgacctcaggtgatccacccgccttggcctcccaaagtgctgggattacaggcgtgagccaccacgcctggccagtacactcttccttgcaccttgcttttttcacctaatgtgtgttgcagatccaatcatgtcagtacatagggggtgggtgtgttctttaacagctgtatggtatcccacttgtactccagtttgcttagaatgctagttctctagtatctggtccctgggccagcagtgtcagcatcaccccagaacttgttagaaatgcacattctgaatcagaagctcaaggtgggcccagcaatgtgtgttttaacaagcccacctggtgattctgatgcatgctcaaatttgagaatttgagtccccaactggtcatttaggttgtttcagtcttttgctattacaaaccatgctgaaattaataacattatacatttttatttcacacttgtctgtgtatttgtgggataaatttctcaaaattggtgggtcgaaggctatgcacactttttttttttttttttttgagacagtctcgctctgttgcccaggctgagtgtgagtgcggtggtgccatctcagctcactgcaacctctgcctcctgggttcaagcaattctcccacctcagcctcttgagtagctgggattacaggattacaggcgcgcacccaccacacctggctaatttttatgtttttcatacagatggggttttaccatgttggccaggctggtctcaaactcctgacctcaggtgatctgcccgccttggcctcctaaagtgctgggattacaggcgtgagccactgttcccagcccacactttttatttagatagattttaccatatgatccactatagaggttgtatcagtttactttcccaccagcaatgacctcaattcttgtttaatggctgtggagtagtctgttctccagaggttttgtttttttgttgttgtttttgtttgtttgtttgttcatttgttagagtctcactctttggccaggctggagtgcagtggtgtgatcttggctcactgcaacctccgcctgccaggtacaaacaattctcatgcctcagcctcccaagtagctggaattacaggcgcgtgccactacgcctggctaatttttatatttttagtagtgacagggtttcaccatgttggccaggctggtctcgaactcttgacctcaagtgatccgcccacctcggcctcccatagtgctgggattacaggtgtgagccactgtgcctggcttctccagaggtttttaagcagatacgtgatacaatcaggtgtaggctttagaaagagctcatggcagggtgggtgataggcaggagggagaagtgtaatgttggtgcaggggttgtgaagacagcaatgcagcaatgagggccaaaggattggggtgggaagttaggaaaggtaaccttggagagctgagtgactggatgttgtggtaaagaatggagactctggagtctccagctgggtcaacagtaacagaatggcccatgaatttcagatcatttccagggcatggcgtagaagcagtgctccgagagcttgaaccgtgccaatggcttgaagcaggcatctgtcctctcttacagcttttgtttccgctctgataacaacatccagaatgtcactggaagctacatttacttctgctgtttgtgtcaggtttttcccccactttctaattgtgttttatgttgcaggatctattgtatttacatacacaaatctggttaaaaaatcgcaattggattggtaaagaatcctagcaactttttagtatttttgtaactacaaagattagctgttcagttaccttcaggattctgttcctcagaaaggttgcaggcttcccaagtatcttcctgttaaaactttccaaccgaaatttccagataggaaagatagaaatcttctaggaaacagctcccaagagtttggggtctggaactggactgcctcagtttcagtcctggctctgccactcaccagctgtgtgacactaagcaagttacttcacctctctagacctccgcttcctcatctgtaaaagagctattaaaagtacctgctggccaggcgtgatggctcacgcctgtaatcccagcacttcgggaggccaaggcaggcagatcacaaggtcaggatcttgtgacagaccatcctgactaacatggtgaaaccctgtctctactaaaaatacaaaaaattagctgggcgtggtggtacatgcctgtagtcccagctactcgggaggctgagacatgagaattgcttgaacccaagaggcggaggttgcagtgagccaagattgcaccactgcattccagcctgggcaacagagcgagactccatctcaaaaaaaaaaaaaaaaagtacctgctttgtggggtttttgtgaggatgaaaacatgtaaagtacctagaacagtgcagtaatgttattgttattactattatcgtcagatttcaggtctcccattctttttttttttttttttttaatggaggcagagtatctccatgttgcccatgctggtctcaaactcctgggctcaaccgatctgcccaccttgacctcccaaagtgctgggattacagtccagtctcccattctgactcagcattgcagcatgggatatttataagtcacccgcaaaggagaccagagtcctctgtgtaatggagaggatctgtccaaccttggtttgtcactgaataagattaggcctcttcccacccagggtgctgagctgaattgaaaggaatatgtggaaatgagccataatgctggtttgtaggtgaagccacagagtcctgcgtgtcctttgacagccctgagcctctgcatgtgcatatctttctgcctgataagcacttcctttccttgtacacaaagcacactcctcaagccgggcatggtggctcacacctgtaatcccagcactttgggaggccaaggcaggcagatcatctgaggtcaggagtttgagaccagcctggccaacatggtgaaaccccatctctactaaaaatacaaaattagctgggtgtggtggcaggtgcctataatcccagctactcaggaggccgaggcagagaatcacttgatttgtagtgagctgagattgtgccattgcactccagcctgtgcaaaaagagcaaaactccactaaaaaaaaacaaaaaaaaaaaactgacaagctgactcctaaacccagtcagcatttgtctggctccagactaccagacactgtgcttgaccatcaaggccttgcttaagtggtacctgctcttgccacctctgactcccttacttctctgcagaaatagtgtcttgttggctgtgtcgtgattccgttttgcataataatgatacaaatggtgtatacggtttaaatgatgactcgagatacaatgctgagtacttccaaagcagaaatcagaatcctcacaacttgttttacagctgaggaaattgaggcttagagaaaaaaaaaatcactttcccaaggtcccacagctgggaagtagagctgggagtccaaatggacttcctgatctcagagtcccttcataactgctgatgttcatactgtgtgtcacagtgatatacatgtctattgcatcatgtgtcacactacattataatagcctgtttggggttttttttgggaggggggcttttttttttttatgagacagagtctcgctctgttgccgaggctggagttcagtggcacgatccccactcactacggcctccacctcccgggttcaagcaattctcctgcctcaacctcctgagtagctgggaccataggcgcacaatatcacacccggctaatttttgtatttttagtagagacggggtttcaccatgttggccaggctggtctttttttttttttgagacagagtctcgctgtccacccaggctggagttcagtggctcagtctcggctcactgcaacctccacctcccaggttcaagctattctcctccctcagcctcccaagtagctgggattacagatgcacaccagcacgcccagctaatttttgtatttttagtagagacaaggtttcaccatgttggccaggctgatctcgaaatcctgacctcaggtgatccgcccgcctccatctcccaaagtgctgggattacaggcatgagccaccacgcccagccagttttgctgtgcattccataaaatagaatacgtgttccctgtaatatgtatcatgtcacagtattaacctacctgcctgtgagtgtttcaagatcaggaactcatttttgtacccatactactgctacacaggaaatgtattgaatgtgtggagatgctcagaggggatgaggaacttgcccaagtcccacagcacactgctggcaaaagcagaagccaagggttgggagagaatagggaaggaaggaaactgggcctctcatgtgggtattgttcacccaccccactcccacctcctagcaaagctgtccaagtgactcacatggagctgcctccagtggctccagaggggagggtctcccttccagcccagagcctgggctgcctcagccatgcataggcaagggtgtggttaggggcctcctcactcacctctccctgatagtcacaacccccaatacaggcacagtactttagtttgccaggctgtttcgcatcccatatcttatttgctttaagactcctatggggctgggtgtggtggttcacgcctataatctcagcattttgggaggccaaggcaggaggatcacttgatgccaggagttcaaggctgcagtgagctatgatcctgccactgcactccagcttgggcaacagagagagaccctgtcacttttctttaaaaaaaaaagaaggctcttggaccttttttgaagtgaggctagagattgtcctcctgtttgacagagaagtaaacccagtcactcagcaagccgttaacagagcaaggaataccttggatacactttatgtgtagcattttacttatttatgaactatatctgtagggagaattcccacagatggaattgcttggtcaaagggtatgtgcatttgtaattttttgtgtattgcctagttgctttctacaggaagacagattgactcccataggcagtgtgggagactacatctttccccgtagccccaccgactcagtatgttacccagtgtgtggattcttacctttccgatagacaaaaaacagaatctcagtgtgctttagtttgagctcttattaagagtgagaataaagactttttttattattattaagagccatttgtagttcttgttgtgtggcttttttttttttttttttttttagatggagtctcgctctgtcgcccaggctggaatgcagtggcacaatcttggctcactgcacgctccgcctcccgggttcatgccattctgctgcctcagcctcccgagtagctgggactacaggcgcccgccaccacatctggctaattttttctatttttagtagagatggggtttcaccacgttagccaggatggtcttgatctcctgacctcacgatccgcctgcctcggcctcccaaagtgctgggattacaagcgtgagccattgtgcccggcctctgtggctcctctttttgtatctttgggcatgtggaaatttcagtctaatgcatcctgccaaattaccctcccgaaaaggctggacaggtttatactttaggccagtgctgtctatgtatttcctttagccaggcacagtggtgcatgcctgtaatcccagctacttgggaggctgaggcaagaggattacttaaacccaggatttcgaatctagcccacacctccctctcctagtagtcattttgtgggcttactgccctctgccccatctccttccctctttgcaaccttccacctgggacactagggcctctctgagccagtcttaccttctccagacaccctctctcttagcaggttttttattgttggtttttgtcagccaaaatatttgtgagtctccataactgaatgtgatcccttcttctagggatgctggtgctttacttgcaagatggatatggtgatagtagaatctcaggcactgtaatgagcctggctactatggaaagaacttcagcatgagcaggagtctaatctggcattgctaggacttttggtagccatgatataaaacagttgcagagtaggcttgtcccagcggggaaatctggaagggcttcgtggcagtgacatttactaggcccttgaggactgtgaggattttgcctagcagagagagggcaggtagagaccactgtgatcctggaagcttttgaccctgtttggaatacaaatttataccaaaaaaaaaagaaaaaaagaaaagaaagaaaagaaatttataccagtactatatatcattgataaattttcattagaaagttctggccaggtacaatggctcacacctataagtccagcactttgtgaggctaaggcgggtaaatcacctgaggccaggagtttgagaccagcctggccgacattgtgaaaccccctctctgcaaaaaacacaaaaattagccaggtatggtggcatgtgcctgtagtcccagctacttgagaggctgaggcgggagaattgattgaaccaggaggcagaggttgccgtgagccaagattgcaccactgcactccagcctaggtgacagagctcatgagactccatctcaaaaaacaaaaaagaaagttcgtcataaatcctttttttttttttttagacggagtcttgctgtgtctcccaggctagagtgttcagttgtgcgatctcagctgactgcaacctccacctcctgggttcaagcgattctcctgactcagcctcctgagtagctgggattataggtgcccgccactgcgcccggctaatttttgtatttttagtagagacggggtttcaccatgttggccaggctggtctcaaactcctgaccttgtgatccacccgcctcggcctcccaaagtgctgggattacaggcgtgagccactgcgcctggccttctttggcataaattctatgaagctaatctattcctatgttgatctgttactccattttcaattcttttccatttttataatactgaaattattttgattgcattcagttctttttcatgtaaatatttatccttcatcagttctttacccacatcacattcttgccaactatagcatctgccattataaatttaattgtggcttttatttttaccattttcaagtctgccagtcaaatttcttaaatttaagttttgtcaagatttgcttctcctcacagttggtgtctccctatgtgcagtttcagccattgtctgtcttgtttgttgttaatttcaactcataatattcattacctactggatgacagaatagtcatttttccctcttggctgatccattagaaaactgaaaacaattttcttcgagaggtctgaaactgctgtggcatcactggtgtccaggttttcttctctcagttattccatactggaatggcctctgccatagcccttctccccagatgtgtcacacatgccctgggttctccttggtctcttgatcagggtccagatctcctcatggtagaatggcaggatcagccaggcatggtggttcatacctgtaatcccagcactttgggaggccgaagcaggtggatcacttgaggtcagttcgagaccagcctagccaacatggtaaaactccatctctgctaaaaatacaaaaattagctgtgcatggttgtgcatgcctatagtcccagctactcgggaggctgaggcaggagaatcgcctgaacccaggaagcggaggctgtagtgagccaagattgtgccacttcattccagcctgggtgatagagcaagactccatctcaaaaaaaaaaaaatggcaagatcagagcatcttgccccaggatgaggcaggcagcatccctagccaagggaatagcattagcagagccttgcaggaacatatgggaaccagccgtgctgagccattgtcattcttctctcctctagaatgcttcagacatgcctgaaacaatcaccagccgggatgccgcccgcttccccatcatcgccagctgcacactcttggggctctacctctttttcaaagtaagtcttttgccacctgttgtgtcatttgatctaaatgactttatcttattttgttttatttttcccatcacaagaaccatgcatgttcatttatagaaaataaagaagaaagaaaaattaataattcacccatagacctacccaaagacaacaactgttagtgtttgggaccctttctcactagtccgtatttcttttctccatgtagctttttgttttgtttttgtgatatcagtttggtttcattgtactgtttatgttgggatggggtatagcttgtgctcagacatacctctaccatactaatggccttttttttttttttaatttatcgaggtttattttcccaataaaagttatgcaggctcagtgttgaaaacctggaaaacacagaaaagtaaaaagggaaaaacagcagtcatccaaaaccccactaccagagacagtcacagtttcccttcggaggtgtgtccttccactgtttctccctgtgcatggtttctccgtagctgtgaccacatggtgtattcagtttgtagctgcttttttcacttcacattaataacatcataaacattttctcatgttactgcaaaccttccttagttgtactattttctggattataaaaatatattcagaaaaactaaagaaagtatatcaatagagggaaaaataaataccacaacacagaagtagtcattaacattttggcatatctcatttcgggctttttatttatttattttaggacagagtctcactccgtcccccaggctggagtgcaatggcgccatcacagttcactgcagcctcaacctcttaggctcaagagatcctcctgcctcagcctcccaagtagctgggattataggcacgcaccaccacaccctgctaatgttttcttttttgagacggagtctcgctctgtcacccaggctggagtgcagtggcgcaatttcggctcactacaacatccacctcccaggttcaagtggttctcctgcctcagccagctgagtagctaggattacagacgcgcgccaccacgcccagctaatttttgtatttttagtagagacagggtttcactgtgttggtcaggctggtctcaaactcctgacctcatgatccacccgccttggcctcccaaagtgctgggattacaggcgttagccactgcacccggccaactttttcttttagtagaaacaagatttcgctttgttgcccagtctggtctcaaactcctgggctcaagtgatcctcccacctctccctcccaaagtgctgggattacaggcgtaagccactgcatccatccctttcagccttttaataagtgtatgtttagcattattataatcataactgtagtgttagatcttctttttgttgtttatgttaggtttttctttgtttattggtttgtttagagacagggtctcactcttgcccagcctggagtgcactggtgcaatcatggctcactgcaacctcaattcctggactcaagtggaaaaccgactgattttgttttattgtattttatttttagagacagggttttactatgttgcccaggctggtaacaaactccttggcctcctgaagcactaagattacagatgtaagccactatgccaggcccttgttttgtttgttttgttttgtttttgagacaaggtcttgctctgtcacctaggctggagtgccatagtgcaatcatggctcactacagcctcaacctcctgggctcaagcgatcctcccaccctgcctccagagtagctgggactacaaggcgtgcaccaccacacctagctaattttcatatttttagtggagatggggttttgcatgttgcccaggctggtctcgaactcctgggctcaagctgtccaccctccttggccttgtaaagtgctggtattacaagcatgagccaccacacctggcccctttttgttctttttaatagtacgtcagcttttttcctggtcattgaaaattcctcaaggatgtctttaatttacatcttaaaatgtaggctggacgcagtggcccacacctgtgatcccagcactttgggaagccgaggtgggtggatcatctgaggtcaggaattcaagaccaccctggccaacaatggtgaaaccctgtctctacaaaaactacaaaaatccatcctggccaacgtggtgaaacccggtctctactaaaaatacaaaaattaactgggcatggtggcatgtgcctgtagtcccagctactcgggagtctgaggcaggggaatcgcttgaacccgggaggcagaggttgcagtgagctgagatggtgccactgcacttcagcctggcgacacagcgagactctgtctcaattaaaaaaaaaaagtatcaattaaaaaaaatatgtacatgtaggcctggtgcagtggctcacctgttatcccagtactttgggaggctaaggtgggaggatcacttgagctcaggagttagaggccagtgtgggcaacatagtgagaccccatctcattcataggtaaataaataaaccgattcatcaataatgtacatcatttaaaaaaatttgttgccagcctaggcaacagagcaaaactccgtctcaaaaaaagaaatatttttttcaacctaaagtacaaatgaaccataatcctctccccaatacagtttcctgtgattctgtcatgcataaatctatacttatgttaaattatatatatttttatatgtatcaaatacatgattcttaccacggaggtatttttatatcaacacagtcaaattaccccattctttcattctttttttttttttgagacagagtctttctctgtcgccaggctggagtgcagtggcgtgcgatctcagctcaatgcaacctccgcctccctagttcaagcgattctcctgcctcagcctcccgagttgctgggactacaggtgcatgccaccacacccagctaatttttgtaattttagtagagatggggtttcaccatgttggccaggatggtcttgatctcttgaccttgtgatccgccttccttagcctcccaaagtgctgggattacaggcatgagccatcgtgcccagcctctttcattctttttaacagctgctcatggttctgttttacagtgtaccctgagggtatttaggtctgtccagtgttggggtatcatagcagtattgtcgtgaacacttcatacacataatttgtgcacttattttcttcaagtctatctgcagtaggtctaccaggtcaaatgcatctccatttgtaattagatagtgccaaatcaccctccaaaaagattgtgccattttacattcccactgacagttacaagtgtgctggcctacccaggcgctcacctgcattggataacaccaaaatttttagttttttccagtctgtgagtgaattaaaaagattttttttcttttttgagatggagtctcactctgttgcccaggctggagtgcagtggcacattctcggctcactgcaacctccacctcccaggttcaaacgattctcctgcctcagcctcccaagtagctaggattacaggtgtgtgccaccatgcccagctaatttttgtatttttagtagagacggggtttcaccttgttggtcaggctggactcctggccttaggtaatccacctgccttggcctcccaaagtgctgggattacaggtgtgagccactgcgcccagccaaaaacataattttttaacacctgtttcctatttcatagctccctcattttggatcggaatttttttttttttttagagatgaggtcttgctctgttgcccaggctggaatgcagtcacataatcgtagcttactgaagacttgttctcctgagctcagatgatcctcccgtctcagcctcctaagtatttgggactatagacgtatgtcattacatccagctataaatcctctttttttgttgttttttgttgttgttattgttttgttttgttttttgagacggagtctgtcacccaggctggagtgcagtggcatgatcttggctcactgcaatctctgcctcccaggttcaagcaattctcctgcctcagcctcctgagaaatgctctttttaatggttacagggtatccccacaagcaaccagcctgggcaacatagcaagaccccatctctagaaaacatttaaaaattagccagacatggtggtgcaggcttatattcccagctactcaggagattgaggctgaaggatgacttgagcacaggagttcaaggctatggtgagctatgatcacaccactgaactccagcctggacacgaatgttaccctgacaataaaagcagaaaaacatccctataagcagatacagcacagttgacttaaagcatccccctcactttaaacagaaaatgtcattctgatttttactctaagaaataagagtgcactaaataacattggctattcacagattttttttttttctttttttctggacctcaggtaaagagctgaatttaggccgggcgcggtggctcaagcctgtaatcccagcactttgggaggccaaggagggtgtatcacgaggtcaggagatcgagaccatcctggccaacatggtgaaaccccgtctctactgaaaatacaaaaactatcagggtgtggtggcacacgcctgtaatcccagctacttgggaggctgaggcaggagaatcgcttgaaccagggagtcggaggttgcagtgagccgagatcgtgcccctgcactccagcctggtgacagagagagactccatctcaaaacaaaacaaacaaacaaacagctgaatttatcaaatgccttggttcatagcataccatccttggtccatgccaggcccccctacttttttttttttcccacttcactccaatatccacctccatttcccaccttcatttctctctctgccagaggcagctgctttaatgcatttgacttctgtccttagatgtgtatgtttcttataaaatatgtagtgttggtatatctgtgtgtatgagtgggaattgcatttccataaatagaactgtgcattgatctccctctgtttccttttccgctctctgtaccttaagatctctccgtggctctgtgtacatccagccattgcttctgcctttgcttttggcagatatttctgaagtcttgagagaccttctaacatttttagtatttaggattctttccttagaccagatgctcccaaaaggaatttctggcagcaatgggtgtgagcatttttatttaaggcactggcttcctgttgctcagtctttcctcctctctgggcaggtaagcctcagtctgcctcgtgccagaagcacagagtataccccatgcctctagagtgtccccagtaagatttctgaaaggcagctgcctggacagcacagccactgggctcctcctggcctcccccctgacatctggctggttggtttgcttaacagaaaaacagcccaccacagcggctctccctcagcccttttcctcccctcctcctggttggggcactggagtttgtaactgcattgaacatttttaaaacttcagggctgagtgtagtggctcacgcctgtaatcccaacgctttgggaggccgaggcgggcagatcacctgaggtcaggagatcaagaccagcctagccaacatggtaaaaccccgtctctactaaaaatacaaaaaagttaaccgagcgtggtggcccatgcctgtagtcccagctacttgggaggctgaggcaggagaatcgcttgaacccaggaggcagaggttgtggtgagccgagaacatgccactgcactccagcctgggtgacagagtgagacttcgtctcaaaaaaaacaacaacaaaaaaacttcatattttcctgatgcctcaacatcccacaaataggccatgaacactttgcccaggtgaacaggtgccagtgtgataaggctggtccctgcgacaagttccctttcttgccctcctctactctgacctagtgacattcagacacatcagtgagatccccttttgcttgtgtctttcaccctgagccccaaagaaggcacttggccgtgggtctccttctgtaggacctgtgagtataataaatcctttcatttcatatgcctctctctcaaggactttcacactgagtttagaatgatcccatcctcatcaccaattgtgttgtaaaaaagatgttccccttgtgaggtttttttgtccttgtttttacaggcagggtcttactctttcacccaggctggagtgcagtggtgcgattgtagttcacaataactttaaactcccaggctcagttaatcttcccacctcagccccctgggtagctgggactacaggcatgcaccaccacgcccgcctaatttttttttattttgtagagatggggtcttgccatgttgcctatgcttcttgaactcctggcctcatgcaatcctcccgccttggcctcctaaagtgctgggattacaggcgcaagccactgcacccagcccactttatgaagtctttaaggatcactcgcacacagccacagaaactatgctcagagaggcttatgaaattacaggatttactatactcacatgttctagagaaggaggcatgcatgccacacagggggccatatgggaggagctccaaggaagccactcaaccaagcaggtagggagaagggggagaggacagaaggaaggaaggagaggggaggacccctgggcaagtgcctttgttagggctcagggtagtacaagcaaagggcatgaggggatttaccatgtgtttgaatggtattaggtcatagaagaagaagaccagaggctgggcaccgtggctcacgcctgtaatcccagcactttgggaggccaaggcagcagatcgtttgagcccaggagttaaagatcagcctggccaacatggtgaaaccctgtctctacaaaaaatacaaaaattagccaggcgtggtggcacacacctgtagtcccaactacttgggggctgaggcaggaggatcacttgaaccctggaggtcgaggctgcagtgagccaaaatcaggccactgcactccagcctaggcaacaaagtgagaccctgtttcgaaagaaaaaaaagaagaaatgggccgggtgcagtggctcacgcctgtaatcccagcactttgggaggccgaggcgggcagatcacgtggtcaggagatcgagaccatcctggtaacatggtgataccccgtctctactaaacaaaatacaaaaattagccgggcgtggtggcaggcgcctgtagtcccagctactcaggaggctgaggcaggagagtggcgtgaacccgggaggcacagttttcagtgagccaagatcgtgccactgcactccagccttggtgacagagcaagactccgtctcaaaaaaaaaaaaagaagaagaggagggccagaaggagaacctgggcagaatgttcatatcctatttgtggggatgttgaggcatctgtaaagtaagtttttaaaataagttttaaatttgcacaatatagtaatatttcacaaaatcatagtatttactttatcccaccttatttaaaattgattcctttgaggcaactcaaaaaattaaatccaacagcataagaaaaacagaagaaatagagttaaaggagaaaattaaaataagataaaacaaggcttgggtgaggaccacacccataccccatgctctaaagcctgtactcttgctagaaatgggcttagttgtggctctggctttttagcagccaaaacacaaaggaaagtgagacctggtgcccaatccacatgggtcacagtgaaaccaacaagaagctcagaggtgtggcctgagagtgatttgtcccaagggctcagactgaaagaatgcaatgtgagaggtatgccacatcttcataaataaagcacaatccatatgcctacaaagtctgctcataggtctttttcttgtagcactaacatggaccaccaatttgcccttccattcagtcattctgcatttattgagagcctgctacatcaggccctggctgggtactggggatactgaagtgagaaaaacagctgaccatccctgtcctcaagaagcatcttgttaagtggtagagacagacaccaatcacacagatagatgtgaagttacagctgtacaaagtgctgttaaggcgaggtccatagcaccaggaaagcatggaagaaccagctcagggtgaacctacacccaaggtgaactgcccaagccccttatccacaacagcacctgcattgacctagctcagccgaaactccaggagtcatccttctccctgtccccccaagcccttgtatccagccccttcacacgtcttgcagctccaattccagaacggatctggaggctgggtgcggtgggtcacgcctgtaatcccagcacttttgggaggccgaggcagttggatcacctgaggtcaggagttcaagaccagcctgaccaacatggtgaaaccccatctctactaaaaatacaaaattagccgggcatggtggtgcatgcttgtaatcccagccacttgggaggctgaggcaggaaaatcacttgaacccaggaggtggaggttgcagtgagccaagatcgcaccattgccctccagcctgggcaacaagagcgaaactccatctcggggagggtgggggtcaggggagcagaacagatctagaatccttccactgctcatcacttcccctccatccccccaagccagggcaccgtccccctctcctgctccctgcttccactctagccctgcagggtcttctacacagcagcagagaagtcctctcatgctgtctgatcatgtcaaaccctgccatcagcactccagtaccagcctgtctcatgcaggcaaatctaaagactttcccatggcactgcagggtctggctcccttttcccgcccagcctactttcctgacactgtccccatgctcccttagctctgggctcacaggccctctgtagtccctgcacacatgaacattcacccacctcaggacctttgcacctgctcccttcgtttatgacgctcctcctatgtcctctcctccagaaccttccctgaccacctgtctaaaatagcagctctgccctttcattctctatctccctgccctggtttgcttttcttagtgcccattaccacctaacaatacatgtaactgtttctttcgagattctttctccctcactggcccatgacctctaggagagcagcgactttgcctgattccttgctgaatcactggtgtctaggacaatgccttgcacgtagtaggcaatcaatcagtatgggctgaattactgaggggttattgtctcatagaaactatgtgagcaaagcttccctgatctgggagctaaagaaggttgagtaagggtggcctcagtgaagagagaagagaggagaacatctcaggcagcaggagagcttgtacacagctgcctgtgggtgggcatgtagcacacacatcatactgcaaaaaggccagtgtggctgcagtgtgtagagcaagagcatgtgtgagccaaggctcaggagacttgtggtggccaccacgagggcaagaggccaacaggtggatgtgagctttcggcttatgagagcagaggttagctgcggagaggcttccagtaagggagtgacatgatctgacagatgttcagcagattccaaaacagccctgcttgagagtggccaggttccctataccccacacaacagcacattattcccttattccctccaggttagagaccacgatagtaacaaattcatcagggatgcagcaaacatggtgtaccatggcatagcctttccaaagtctagaattaacatgtgaccattgactggagcattgtgacagaatatttctcaagtttcacctaacgacgaaaagaccaagaagcagctgtcagggatgctgtcatagcttcagccatcactgcaggaggagtcatcacaaagcagaatgtggagaatggagtgggacagatgtcttgtaactagcatgcttgcggcctgggtggccactctgtaggggatccctggatgattaaacagggagaaggaaatgtggaagagcgagttctgaggttccaacagctctcctggggctctatactgaagactcccttatcccttcagaacccctgtgcagcactttgagcacaaacataattgcctccctccagataatggagccactaaatgtaaacttacaaacccctttgcgaggtacagctgggggcttgaggtttctcacctttcccccacagctgcagaaactagaatgccactagtattgtctgagactcttcctgactgtcccccgactcaagaagggtgagaccaacctccagaagagacgcagggactctggtttcctcacagccactggcaaccctaacttcctgtttctctttgtatttctgcctcagatattctcccaggagtacatcaacctcctgctgtccatgtatttcttcgtgctgggaatcctggccctgtcccacaccatcaggtcagaaggcatctctctgcaacatttgaagcagctttctcgggaaccagtacagggtcttggatgagaacatgacttttggcatcattcagagccaggtttgaatcctggctataaaactcaagggactctttcccctgcacactgtagatgactaggacaagaacaatgacctctctgggccacagtttccttatagacatgatgaggatctggtgggtgtttccaccaccacagctgttgggaaagtgatttgtgagcagtaatgtcatgttagttgtgacagtactcaggtgagtaacaccagtaccacctgccgggtgttgtggcctagctgtgtgctaagtgccatgttgggctcctcacacatgatcgtgtttcgtaaggagccagaggcagcatagtgaaaagttaggagcgtgggctctggcatttgactaccttactttgagtccagactctgccacttaatagctctgtgatcttgggcaagttacttaatctctctggcctcaatttcctggtgaatgtggagaaaaataatagtgcccttcccatggggtcatgtggaaagcttttagcacagtatctggtgatttaaagtgttcagtaactattagctgttactgtcattatctgtgttaacctgccagacaaccttatatgggttgcttttgctttcacacctgtatgatagtcatggaaactgaagcccagagaggttaagaaatttgctaggatcacaccactaataagcaacagagccaggattcaaacccaggtgtggctccagagcccatcctcttcccactgctaccctaactcaaactgccacatgctcgtgtcctttcagtggggagagtggttcattagagggggttgctacttttattttggacaggccagttctccattctgcaggactatcccatgtattacaaacagttggcaaccttgccctgctcaccaaatgggagttgcataccagtattccccagcttgtgactacagagatgtcccagtatgtttctttctgccccgttgaagaggtgcagcctcaggctgagaaacactgatagaccaagaggtggccagggttcccagaaggaaggaactcaccttgaacttagctttctttgaagggtaggaaacctggaagacgtacaaaggagggagaggtcaggtgctagaaagtttgtgcacattgagggcatgggcagaatctgctcccaaaagcattgaaagccaatatgaggccaggtggtggctcatgcctgtaatcccagcactttgggaggccaaggcaggcggatcacaaggtcaggagattgagaccatcctggccaacatggtgaaaccccgtctctactaaaaatacaaaaaaattagctgggcatggtggtgcatgcctgtagtcccagctactcaggaggctgaggtaggagaatcattgaacctgggaggcggaggttgcagtgagccgagattgcaccactgcattccagcctggcgacagagtgagactccatctcaaaaaaaaaaaaaaagccaatatgaatgtggcttcattcttctaggcacactggcaggacagtgtggtagtcaggagcacagggtcaagaggcaggcagccttgggacaaacacctggtgctgccagctctaatatgtgtaaattactcaagctctgagcatagttcttctacctataaaatggagagactacaggtacctcctcagaggtgtggggagggtctagtgagccccaggctgtaacatccctagagcacagtgccaagcacacagtgagcctagtggctggcccagggttacacagctgagacttcacctctggtcttcccactgaggtcattgttgtcctcacctgcactgactcttcacccacaaaattctattctagctagcttgggagaattctagtccagccccgcatcctgaaaaatggaggcccagggaacctgagtgacttggacccaaccaagataatggcaggcccagtcgcccttgctcacaggacaaaccagtcctttcgtggtggacctggggtggggtgggggcagtcacttgcagacattgggtgtcctcctttcccatgctgattaggatcctccccaactgtagcccatcctaccccagcatctgtgagacgcttgagacccccaagtctccccacagcccagcctccacctcagagagcccagtgggttttgaaagccactgttaggctgtgtgctgaggaactgattatttaatgttatagcaacaaccctacaatgaagatcttatctctacccagctgcctaggcagggtattttgaacctttatcatcttgacaccaaagactttttttcccttttagaataataactaagggacattgtcccaaatttctcatagatgagtaatctatgtcaagaaataattgagggtgggcacggtggctcacacctgtaatcgcagcactttgtgaggccaaggcaggtggatcacctgaggtcaggagttcaagaccagcctgggcaacatggtgaaaccttgtctactaaaaatacaaaaaagtagccgggtgtgatgacgcacccagctactcgggaggctgaggcaggagaatcacttgaacccaggaggtggaggtcgcaatgagtcaagatcgcaccactgcactccagcctgggtgacagagggagactccatctcaaaaaaaaaaaaaagaaataattgtctatctgtcttttagccacttcataatttttagagatagatattatcaacagaaaataaaaccaacagcagctaaaactgcacatggtaaaatgtatgagtgactagaaactaacagaagaataattttcttaatgaaatttagagcaacaaaatttgacctgggaaaaccataccttttaaaaataatggatcacctgggcatggtggttcacacctgtcatcccagcactttgggaaccctaggctgttggatcacctgagctcaggagttcaagaccagcctgggcaacatgttgagaccctgtctccacaaaaaatacaaaaattagccgggtatggtggtgcgtgcctgtggtcccaactgctcggtaggctgaggtgggatgatcgcgtgaacctgggaggcagagaggttgcagtgagctgtgatcatgccactgcactccagcctgggtaacagagtaagaccccatctgaaaaatataaaaaaaaaaaaaaaagaataatggatggccataggcagaaggtatgcttaccatatggggttaaagctggtccactaaaaaatttgatggggaccaaaaactgtcagatgaaggaaatcattattgtaaaattaacatgaaaaagaactgaatccagtgaaaataattttagtaagtaggggatgatttgatcatgctttttagaaagttggtctaccaattaaatggatgtttcaattaaatcgagttttcttaaatattttctcaaggaaagtctacagtgttgttagaattttgatcagctgcctgtatccacaaacttagaccttcctcaggatccaaacaacagatccaaaggtttaagacagggaaattgggctcagaggggttatgtaaccaccaggattcacagctggtaagggcaaagtgaggttttgagctcaggtctgtctgactccaaaacccctattctttacagttttggcaaaagtgaagtggggggagcttaaagagggtgggctggccacctcctgccattgagcctgtggtctcccaaggactggcagaggagaggcctgctgaaaggctgcagagagctgcacccgagctgtgacagcacaggctgaggttctcaggattccctccacctccaccaccacttcctagcccacattaagcctctttggaacaaaccccagcctgggggattggaggaaggcaggggccgcagcctgccttaccttgtgtagtcaccaagattcaaacccaagacatccttcctgcaaagggaacctcggcttacttcatcatctgtgtctgagctcgtgccccacccagctgaccttagagggaaaaaatgcccagaaggaccagatctgccaccccagaggaggaagccacatcaccagtttcactgaccctgccttccacccccaggggagaagggcaccaggatgtggcttgtcagtgggaagcaatgacctttacgtttgacatgagccatcaagggccaggaagaatctctgcctgctacaaaagtctgcattcagagtcattcagcaagcattttagcagatgtctagcaggcaccaggtatcttcaccccagggtagggtgaagatgatgagacggggcctctattctcaagtccacaggctcgcgctagccaggttgcttgactcctcccctgtgtagtgctaagcagcctctcttttcttggaataacaaagatatcaatctagagacttgctacttgaagttgaagctgcagttaagtttatagggtgccaagtgctcatttaatcctctcaatagccctacaagaaaggtgttgtagcattccagatgaggaacagttgcacagagcagttaagtaagtttcccaagatcagaccactaataagtggcagagttaggatttgagcccaggaagtctggctccggagtccatgtctttaactgtcacactctgctggttgagaagctgagcaccaagctcctaaggaagaggccggctaagatgggcagagttcttatccatacctgcactcacaccctggcttcagactcccccaaaactgattcagcaaactaatctgaaagtagcttcctgtcacccacccagcttctgcctcccaccgcctcagaaccctgctgtgggagcccatttccgattctggccttgcacctgctgcgcttctcttcacaaagccctcccatcattcataccacagccctacaggctaggagggatcggctctttgacaagtggagaaatagaggcccagagatggttttttgtttttgtttttagagacggagtctcgctgtgtcgcccaggctggagtgcaatggcacaatctcagctcactgcaacctctgccccccgggttcaagcaattctcctgcctcaggctcctgagtagctgggattacaggcacctgccaccacgccgggctaatttttgtatttttttaagtagagatgaggttttgccatgttggccaggctggtctcgaactcctgacctcaagtgatccgccacctcagcctcccaaatgttgggattacaggcgtgagccactgcacctggccagagagggttcttgaatctacatcttgctccatgccaccagggtctttaaagagagttcccttggccgggcgcggtggcttacgcctgtaatcccagcattttgggaggccgaggtgggcgaatcacgaggtcaggagatcgagaccatcctggctaacacagtgaaaccccttctctactaaaaatacaaaaaaaaattagtcgggcatggtggcgggtgcctatagtcccagctactcgggaggctgaggcaggagaatggcatgaacccaggaggcggagcttgccgtgagccgagatcgcgccactgcattccagcctgggcgacagagtgagactccatctcaaaaaaaaaaagagttcccttttccctccctttatcactgtgacctgggtacctcctggcctgcctcatccctgctaaagactccatgccaggcaaagcattcatcctgccttctttcatatcttcatagcaatgctctgagacagatggtattgttagccctgtatacagatgagaagattgaggtccagggagacagagccactgaaatggctctcccacagccacatggcagagcaggcctcagtgctgggccacccaggcatgtagccactccacagtactgccaccaggctgggtcaagaggccttggtttgctaatcttgctctgaaaaaagtccagaaaaggtctctgcttccttcctggctgggaggtggggcatgctgggtaatcagagagaatgcttctagagacgaggccaagctggtcttaaacaactgaggccttgtggaaggagtgaatgtgatggtgatcctgcccaggggctatgattcatctggctgattgattccagctgagtctgtaaaaatctcagtcctgctgttggaaagcagaatgtcaagtcatggagtggggtgggggtgactgtcaggtcatctaacttgataggtttggaagggagtccacaaatatgcttcttgacaagggactcatataggtggcatgtgggccagactttgggatcctctgctctcccaaaaatggtattttgccttcagtctatctgcttctgctttgcatttctttgatgttaacaaaaaggcagtagagaaatcactatgagtgcaaaaacctaggtttgagtcttagctgagatataggacccctgtgtgactctgggcaaatcacttaccttttgagggcctctgttttcacatctgtagagtgggaacagtaacacctacctatcaggacagctgtaagggtgccagctgtaaatggggcaggggtgtgttaaggctgactgcccatgggggctctgtttgccgacttgctttgtctttccttccagccccttcatgaataagttttttccagccagctttccaaatcgacagtaccagctgctcttcacacagggttctggggaaaacaaggaaggtcagtgctaaccactttcccctgtagtgtgccttgggtgtcttcctccaccattccctttgtctctccaatattggggttctccaatagagcaactgatgaagtgggctctggaattccatggcctggattcacattccaactctgctattgtctagacatgggaccctgggtgaacgccttacctctctgagcattgggtgtttttgtttttgttttttttcccatctgtaaaatgaaagtgttaatctagtacctccttcacagtcatgttgttaagatggcgagtcaataagtggaaagcattcagcatggtgcctggctcatagtaagcactcaaagtcggccttcatgattattttattcgtatatatttttagtgtgatcactgcctcacctaaggtttgaaaagggggttccacagctcttttttcaaaaataaaaactggccagaaacagtgtctcatgcctgtaatcacagcaatttgggaggccaagacaggatgatcacttgaggccaggaatttgagaccagcctaggcaacatagtgagacctcatctctacaaaaaaattgtaaaaaaatgcaaactatggggaagtgtggagatcctgggatttgtaggttagttagggtatggattcaaatgctgtaacaagattatcaatgcttgaccaaacagcaggtatttctttgttttttgttttttgagacagagtcttgttctgtcacccagggtggagtgcagtggtgcgatctcagctcactgaaacctcagccaactgagtaattgagattacaggcgtgtgctaccacacccagctaatttttttgtatttttagtagagatggagttttgccatgctagccaggctggtctcaaactcctgacctcaagtgatctgcccacctcagcctcccaaagcgctagaattacaggcgtgagtgagccaccacgcccagcaggtatttctcttgtatacaatactgagcatgtgaaatctagcacttttttttttttttttttttttcgagacagggtctcgctctgtcgcccaggctggagtgcagcggcacaatcttggctcactgcaagctccaccccctgggttcacgccattctcctgcctcagcctcccgagtagctgggactacaggcgcccgccactacgcccggctaatttttttgtatttttagtagagacggggtttcaccgtgttaggatggtctccatcccctgacctcttgattcgcctcccaaagtgctaggattacaggcgtgagccaccgcgcccggccgtagcactctctcttactggtgcctagcacatgctgccttgtccctaatcggcagcaattttatgtgattgctttgtgcatctctaaggaacctctgttaaacaattgttgattttttttttttaaagactgagcttgggccaggtgagatggctcacgcctcccagcactttgggaggctgaggcaggcggatgacttgagatcaggagttccagaccagcctggccatcacggcgaaaccccgtctctactaaaaacacaaaaaaaattagccaggcatggtggcgtgtacctgtaatcctagctactcgggaggctgaggcaggagaatcgctttaacctgggaaggcggaggttgcagtgagccgaaatcgcgccactgcactccagccagggcgacagagtgagaccctgtctcaaaaaaaaaaaaaaaagactaagcttggccaggcgcggtggctcatgcctgtaatcccaacactttgggaggctgatgcaggagggtcacttgagccctggagttcgaggctgcagtaagccacggtcagtgcactccagcctgggcgacagagcaagaccccgtctaaaaaaataaataaataaaacagtaaaaaggctaggcttataccacagtcttcaaggtcccaggccctctctatctcatgctccgccatatacagcactggccctcgggtcaggatagtgtcatcactccactgtccagccagaaggaaggagaggcatccatattccctgtccatttagctataagagaagctggaaaatggccgtgagtcggtctcgtgtccagttagaactaactcatcagggtgcgcatctgcagtcttctgttccggcaaggagaaagcattcgtatcatttctagcttgtcaagccctactgtttcagcgatcctcattggagaggaatcagcagtcgaaggaacagcgggccaagcgcagtcgtgacgtggcgttcagagagcggaagttgtcagatttcaccgggccgtaaagcgcgctggctgtgtcatcttccggttagcgacaacggctctgaccgtctggcaggccgcgtggcgcccgcgccggccttcctgcaggggactccaccggagccttgccaattccgtttgtttccctgttgtcgcccgcttcaccctggatcatgttcaagaagtttgatgaaaaggaaagtgtgtccaactgcatccagttgaaaacgtcagttattaagggcattaagagccaactggtagagcaatttccaggtattgaaccatggcttaatcaaatcatgcctaagaaagatcctgtcaaaatagtccgatgccacgaacatacagaaatccttaccgtaagtggggaattattgttttttagacaaagaaaggggcctttttgtccaactctaaggttgcttcacaaatacccttttatcctgccacaccagcaggttgataaaggagctatcaaatttgtactcagtggcgcaaatattatgtgtccaggtttaacttctcctggagctaagctgtaccctgctgcagtagatacgattgtagcagtcacagcggaaggaaaacagcatgctctgtgtgttggggtcatgaagatgtctgcagaagatattgagaaagtcaacaaaggaattggcattgaaaatatccattatttaaatgatgggctgtggcacatgaagacatataaatgagcctcagaaggaatgcatttggggggctaaatgtggatattgattgtgtcgtatgtgtgtttgtgtctgtgtgtgacagcgtgaatacaatgcctctgtggttatgctaaataagtttaacagatactttatagaaaacaaatcagggtgctcttaccacagatgaaaaaacaaattaggggacaagcagcaagcagtctgctaacactctggaatgtgaaaggagtgtctggactctgtgactcccggcaaactccacagcctctagttgtcttcttaggaagcttggaagcaattgagaatggtctaacatcaagatgtctaccacagggccccccacaaaagcagcctcggggactccggcctttccttgagacctgcatctcttcccttcttcatcgcctgctagtgaactgaggctgccgctaaccttcttcatcctttggtggcaaagtagaaagattccagaattaactcgacctttctaaagacctgggctcagaggcagctggcactgactgagcacccactatgtgccaggcactgtgctgaatgcattgtaaggactgtcttacttattcccccacagcagccctaagaaggggtgctgttatcccctttttacagataagaaaactgaagctcagagagggcactgccttccccaaggtcacccagctacaagtaacaaagcctgtgcttctaacaccaaagaccacttcccgctgacactgtgccaggcttgtaagtctctctctgggcctccattccctcctgtaggaaattggaggggttggggtggctccagtgagctctccccttctgaaactcatactaatctggggcagccaaggcttagccccgccagcctgtgaacctctcacagtgcccacagccatgccctcctccgtccaggggctgacaggtgggaggggtagccctgcctcagggagtggacttacctggcctctctgctcagagatcatcaattatgaatttgacaccaaggacctggtgtgcctgggcctgagcagcatcgttggcgtctggtacctgctgaggaaggtgagtagtcaggacctgggcagaaggggaggatggggttgacagggcagggtgggtcacagcaagctggtctcactccccgctttcctcagcactggattgccaacaacctttttggcctggccttctcccttaatggagtagagctcctgcacctcaacaatgtcagcactggctgcatcctgctgggcggactcttcatctacgatgtcttctgggtgagtcaggcagggatgccaaggatgtctggctccggggccatctcatctcatcaccctgcctctctggcccaagttgcagtcatctgacggagaagagctgttttgggctgaagttccggaccgcagagcaagtcctctctgggcccatctgtgagatggagccagagagagcagattctacctctttctgagagcacactcatgcccggtgccttccgaccacctgcctctcttccttgctagcaggggtgttacctaatcccatgtctccttggcaagggagttgagactcaaagaagttcaggtaggggtggaagaatgttgatgaatgggcccagcaagggcattcacattcactctgagaggcatcacagagggactgacgtcagcctgactcaggtacccttttcctggccccaggcagcctcttcccctctcaagtgggtagcgctgggggactttatcacttgggaggaacagaactgtgaacaaacataggctgcctggcttgggccatcagaggtcttttctatactccctcgaatttcccctttgttgcccagaaccagtatcagtggccacctcacctcagcttcagatctgcactggagcccctcccagctcccctcagatcccaggcagcagcacatctagaagcccagggacagccattcttccccccacagcccctcacttcccttcatactgctctttttttctccttctaggtatttggcaccaatgtgatggtgacagtggccaagtccttcgaggcaccaataaaatgtaagtgaccaccctgccacagggaaccccttcccccacccctgccgggccatgcccccacagcccgtttcagtcagtgcatctccctatctcttccccatgtacctcttcctcctgtggctccccagcctggtttccttatcctcaattgattcatctggctgtgttcatcctgcccaggtcccggcccctggccacttggtcgtggtgcagcatggcgtgaaatgagccaaaatgggagcgagcatggaggggaagtgtttaacccagcccggggggcacgcgcaggggctttccaggagagaaaacctctaagccgagacccctcactggggtccccttggcacctgagtgtcgggtgctgtctatcccgtgcctctcaaactgccttggttttgttcttcagtgtatccactgtttataagtaatagaaaatccacctacaggttgagcatctctaatccgaaaatctgaaatccagaatgttccaagacccaaaagtttttgagcactgacatgacaccacaagtggaaaattccacacataaggacttaacacatgtgaactgtgtttcatgcaggaaatagcattttaagattgtataaaactctttaggaggctgaggcgggaggatcacttgaggccagcagttcaagaccagcctgggtaacagcaagaccctatctctacaaaaaattaaaatattagctaggagtggtaacacacatctgtagtcctagctacttgggaggatctgaagcaggaggatcacttgagcctgggagttccaggctgaagtgagctatgatcatgtccctgcattccagcctggatgacagaatgaggccctgtctttaaaatttatatatgtataaatatatatgtgtgtgtacatatataaaactaccttcaagctattatgtataatgtgaatttcatatttaaacttaggttttatccccaaaacatttcattatgtatatgcaaatattccagaattcaaacaaagtttgaaacatttctggttgaaccatttcagatatgggatactcaacctgtataactgtctttaaacaagggggaaattttgtcatctcacactacagcaagcccaggggtagaaggctcagagtgagttaatgaccctctcttcaccaagagccaaggttacttcaggactcccaccccagcattctcagcatgtccacctgccccttaggtcatcccttcatggtcccaagatggctgccacagctcccagcactgactcctcacatagctgtgtccagaaaaagaaaggggaaattatgtctcagggagggatggtttttcccaagtctcctgtgcagtctccctcatactttattggccaaaactgtgtcacaggcccaagtctaaaccattcaccagtgagggggataggaaacatgattggcttagagtttaagctttagactagtggagaatcacctgctggtattacaaggctcagagaggggaacagaatccgtcaggcatgctagcaaggaagagaggaagatgctgccgggagggcaggcaacagtgagtgcatgccatggaagcactggctcgtggcgacaggcagtcgttgggggagactgggggagattccactcaggggatcaagaaacagctgtctttctcgtgactcactctaccactgcggacagcctttctccctgcgttgaggagagcttcatggccacaaacagctcctgaattctgtggtcccagcttagtgaccccagaggaaaacaggtttctcccagctttggcctgaataaacctacaagacctggcctggcccatgagccagacactcccactggagagatggaggatcgtgatggacaggccagggtcactgccctctccagggcctgggggcagagtattggaattggcagcccccgagaaccaagtgtacacggggagggcatttctccagagcaagggaacagatgctgggccagccagagcaacagctattccccagtgccttgatggttgagcctgggggtgtgtaagcccagagaacccagccagggtgtcaggaaaatcttttctgggtcatgaaggatgaatacacatttcccaagcatacaggggcaatatgggcatttgaaagataatgtacagcttcagcaaagggctggaggcaggaaggtgcatggaggggcctgggagcagagaatcagggagtgggcatagctgagttcagggaaaagaggctggaaagaggtgggcagaggccagatttgggaagccaaggatgccactctaaggagcttggacactgccccgtaggccactggaagactccgagcagggaagtggtgctgtcatatttggtttctgatacttagggtctggttttctgggctagggagaagacccactgccttctactgctaggactagtgctcagtggcagaaaggcagaacagtgaagtgctcatatgctgacatcaggctgcctggacttgaatctcagctctgccacttgctgaccgtgtggccttggggagaagacttgtcctctctgagccctggtttctagaactgtaaaatggtgacaatagtctctgccactcaaaattgaatggtaccaggattgagagagaaaatctgtaaatcactgcgttgtacattcaaggcaggaagaggcaggcagggcaagggtacctatccatgtattagggaagcacaagcttattcagaatccctgtgcacgcacctctgtgtacctgttgttggccagatgaaggttgcagtgagccaagatcacaccactgcactccagcctgggtgacagagtaagactccgtctcaaatatatatgtatatatgtataaagaaataaaaattaaatggccaggcgtggtggcttacgcctgtaatcccagcactttgggaagctgaggtgggcagatcacaaggtcaggaattcgagaccagcctgaccaacatggtgaaaccctgtctctactaaaaatacaaaaattagccaggcatggtggcgcatgcctgtaatttcagctactcagggggctgaggcaggagaatcacttgaacccgggaggcagaggttgcagtgagccgatattgcgccactggactccagcctgggcaacagagcgagactccatctcaaaaaaaaaaaaaaaaaaatgttggccagagctgaccccctacctgcaagtaaggaattcaaggaacaggattttcctgattggcttagtcttgcaccacacttatcacctgggaaggctgcctaacacaaaaccaggactggattagtaaagaaggcatgaggtagcagttaactgtgtacaaatcatctaatcttcactatcaccctgaggggtcagttctgttgtctacccgtttcacaggtgacaaaactaaggcaggtaagtaacctgtgcagagcacagaactaggattcagacctacagacccacaagtcagcctctaaggcccacttataactgctcttctgcttgcaaggccctatggatgaaatccagttataacctccttttgctataactagacacagagggaggcgtttctccctaatctgtatttatccagacaagctgtccagcaagatttctgagtgaggggctttaaggaagcaatctgcgggtgtgtagccttttctccctcagcaaatacagaaggagcttatagcccgggctcaccctgcttcagaacaagggccaacatctgtccatacccctgttatagtgagatgggaaaccttgtagatgttggcactgtgtggctcttttcttttatatactgggctttagggtcaatcccatttaaccaaagggttcaatagctataaaaaggcgttgaaattgtatggttatttgagttatagctcagtaaaggcattaaatcttcagcctagatgaccctattcctccccactctaaccagctgtgactccagatggagacattgccctgcatcctctcacgtccccatcccccacatcccacccagaaacaaatgtgtgagtttcatacaacaagaatggggggttaggagtcaaagtaagctgggaatacaaaaatggggcgggcgtctaaaatcccagctactcaggaggcaggagaatcacttgagcctaggagacagaggttgcagtgagccaagatcgtgccactgcactcccgattacagtcctcattgccctgggcaatagagcaagccccgtctcaaaaaaaaaaaaaatacaaagtaggccgggagcggtggctcacgcctgtaactccagcactttgggaggtcgaggcgggaggatcacgaggtcaggagatcaagaccatcctggctaacacggtgaaaccccgtctctactaaaaatacaaaaaattagctgggtgcggtggtgggcgcctgtagttccagctacttgggaggctgaggcgggagaatggcatgaacccaggagatggagcttgcagtgagccgagattgcgccactgcactccagcctgggtgacagtgcgagactccgtctcaaaaaaaaaaaaaaatgtaaactgggctccagctgactcctcacattcccgcctcccgcttcagtggtgtttccccaggatctgctggagaaaggcctcgaagcaaacaactttgccatgctgggacttggagatgtcgtcattccaggtgagcctgctggtgtgggggctatgtgaaaggggtggagagggtattccccggagcaaggggattactgctaaacagacaggcttaccagctgagaaagagaaaaggtaaggctggatcaggccagggattggtgaagggttcccccttaacatccgtttacggagggccagtcaggtgccatgccccaagctgggtcctggtcaggtgtcagtgaacaagactgtcttcacagagcctctggtctaggtgagcagatgttgctcaagaactacaaaagtaaaagtctaatgacagattgaggtacactctgaaaaagcacgtttcatgacaatcttaacagactggacccctgtcacacacacccacacatacacataccccttcccagcatctgcaagcatcacagatgtaccagaattgccctagcccccttgctcctcctccctgtgccaagacatctccagggagaacacacacatgggctcctgtctgcactctcagcagaggagcatgtgcgtgcacacctgcttatctgcagaggctggcctttgagcccctggatctgcgtgtgggttctagtcagtgtgtctgtgggtatggacacgggccctgtccacaatccaagcaggatagcacatcctgcgcaaccacagcctggcctcactttggggcaggagcagctcaaactaccagtcaggaaagagactaagggcaaagctgagctgctgaagtggctgaggctcgggtgtgtctgcttatctgggcccagttgtgggggcagtgaacccaagggacatacttgtcttcctagcctcagagtgagagggttagaagcttgcttaaaagaaggttttagctgggcacagtggctcacacctgtaattccaacactttgggaagctgcgtggggaagatcacttgatgccaggagttcaagaccagtctggacaacatagcaagacctcatctctacaaaaaaaaaaaaaaattagccagtcgtggtggctcatgcctgtagtcccagctactctggaggctgaggtaggaggatcgtttgagcccaggagttcaaggctgcagtgagctatgattgtgccactgcacttcagcttgggtgacagagtgagaccctgtctcttaaagaaggaggtctggcctgggcaaattgtgagaccatatatatatataaaattattatttctcctttttttttttttttgagacggagttttgctcttgcccaggctggagtgcaataacgcgatctcggctcactgcaacctctgcctccctggttcaagcgattctcgattctcctgcctcagcctcccaagtagctgggattataggcatgcaccaccacgcccggctgattttgtatatttagtagagatggagtttcttcatgttggtcaggctggtctcaaactcccgacctcaggtgatccacctacctcggcccccacaaagtgctgagattacaggcatgagccaccacgcctggccgaccccgtctatattttttaaaagaagaggaattattttaaagcagcagattaaaggctgacttactttccagggtaggatattatagcaattctgatcacctagggtgatacaggcacttctatttgtgacagttgcattttgtgacacatggaggtgacacagaggctttccctgttttaccagtgaggaaactgaagctcagaagtaaagggaatgatacaaattcacacactagtaagcaacagggccaggactcagaccagcactgtccaactgcaaaaaaggctacgctgtcagaactgctccttacagcagcactagcagtaataagacggtaatcacaacagctaccatttatcaagcacctgtcgtgtaccaagaatggtgctaggtggccggccgggcacggtggcttaagcctgtaatcccagcactttgggaggctgaggcgggtggatcatgaggtcaggagatcgagaccatcctggctaacatggtgaaaccccgtctctactaaaaatacaaaaattagccaggcgtagtggcgggcgcgtgtagtcccagctactcgggaggctgaggcaggagaatggcatgaacccgggaggtggagcttgcagtgagccaagattgcaccactgcactccagcctgggccacacagccagactccatctcaaaaaaaaaaaaaaaaagaatggtgctaggtactttttatatgtcatctttacttctcccagcagtccagtgagatagagggcatttccattttacagataaggaaactgaggtttgacttgcctgaggccacgagggtatgggcttgcacccatgtgtcttcataatttgcagtgctgtgaggcagggagacttgcttccccagtagaaggcatctctgtcagacaaaagaaatggagtcctgtaaagcatctggctcactcttaagggcacggtctgtcattcacccacacaaacttcccctgtgtccttgtcataagttccaggcttgagacaggcacaggacatctcggcatatctgtcctttccccaccctctatatatatccccagtagtcccgcaatcacaataaatgtaagttgatcacagtggagcgttgtttggaaggccagatgcactttaggagtgaaaatccctggcagagctctgacccctggattagttggagaacactcgtagaaatcagccgccagggggcactgagttcccagcttgattccagaataactgcagttgtctgctctatccccaaccaactccctactcctacagagtattcattgagaactaattcatttccctctttaaaattaatcatatgttgacagttgacaggcagtgcttcttttttttttttttttttttttttgagatggagttttgctcttgttgcccaggcagtgcaatggcacaatctaagctcactgcaacctccacctcccaggttcaagtgattctcctgcctcaacctcccaagtagctgggattacaggcatgtgccaccatacccagctaattttgtatttttagtagagacggggttgcaccattttagtcaggctggtcttggaactcctgacctcaggtgatccgcctgcctcggcctcccaaagtgctgggattgcaggcgtgagccaccgcacccggccaggcagtgcttctcagcgccttccttcaagtaaatgagactcagagcccagagcccagtaagggaggcgacacacagggtgtgcgtatagcacagggacaggactggttggctgtgttttggggttgcttaggcttccgggatgtctctttctttttcttttttcttttttagcagaaccattgcttacaattggcttggttttcaagtttcagagtgcagtgggtggaccgaggtaaccctctcctgtgctcctgtggagccttcaaatagcccactgcttgcccctcctcctcccccctccagccacgcactgccacaggggcctttttcaaaatgtgtttaggttgttctgctcagaactcctccagtgcgtctcttcactcaggataaagacccaactcctccccatggtcctcggggccctgcagggctggtctatctcctcatctcctgccagtaggcaagctgccttagtgacccctcagtccctgccacatctcctgagcactctttctccaggacctttgcacatgctgttctctcctcctggcgtgtggcatttccaagaagccttccttctttcccctccttcacccctgcccagcctaggtctcatcctgttacaccttcttacaacatgggaagcacaattctcctgcctcagcctcccaatagctagaattgcaggcgtgcactgccatgcccagctcattttggggttttttgtattttgagacagagtctcactctgtcgtccaggctggagtgcagtggcgtgatctcggctcactgcaacctctgcctcctgggttcaagcgattctcctgcctcagcctcccgagtagctgggactacaggtgcctgccaccacgtctggctaatttttgcttttgttttttgttgttgttttgttttgttttgtttttttgagacagagtctcgctgtgtcaccaggctggaatgcagtggcgcgatcttggctcactgcaacctccacttcctgggttcaagtgattcttgtgcctcagcctcccgagtagctgggactacgggcacatgccactatgtctggctaatttttgtatttttagtgagacgaggtttcgccatgttggccaggatggtctggaactcctgacctcgtgatccacccacctctgccttccaaagtggaagcactctttaacagtcacaatctcacaatgatttccgtgactatttgaggtatgtcatagtgtggctaccctgtccccctggctgagctctgtgggagcagcgattttgcctactcctacatttcccatagtgcctggtacataggcacttgataagcatttgggcagacacggtgtgacatagtatgatgcggtgaggtgctgggtcattgtagtcccaggccaaagcaaaatcctgggcccctctcattgttctaggtagagaaatgggactttctgctgtcacttgagagtattggccacacccttggtctccaatgattgctccaagatggaacaccaggttggggaccaggacccagtctcctgttagttcactgccctgctgcttccctgccactctctaaccccagctttctcccacagggatcttcattgccttgctgctgcgctttgacatcaggtgagtgagtgagggcctgccccagcatgggcttctccagggattctccagtggccttcaggagcccagagaaggtacctcaggagaccagaccctccacccccacagcagccagagcaattctgattttatctgcattttgcatcttgaagttctaagtatttgaagagcctgtggtcaaaaaattgttttaagaatcataggccaagagatttaaacccacaagggcctggtggtactcacagtgctttctcactgtgtgaccttgacaagtggcctgaccttcctgagcctctggtttctcatcttgagttaataacaagagttcctaccatgaaaatctggagagagtgctgagcacacactgacctcagtcgctcttggttgaatcctggttgcagtcatcatcatcatcttttatcagcctagcgtcaggtcaccatgtctcagctgctctagctgttccctgccctctctttactcagacatttttcagtctgttgtagacagtgagcacgagggggagaaggtgggcaacttaggtcagcgtttaaaacacaagaaaggtcttatccaagttaatgcacctatgcaatgggacttgccgtcagcagggggcgccagcaacagctccatcattttatgccccgtcatccctgtgagggctggcaatgttgcacttaactttgaggtggtttgtgaacttctcttgatttcctcatgcctgatagttgcaaaagcagtaataacagtgacagtggtaatgagaaacttactaccagcatcattgaaatccagtttccatgtgaaacttaggtttttcccactcacatacacctgggttatttgtgtagtgccacttcaaaccttaggagcatatgggctcacagtcacctttggaagagacctggccagtctgtaagtagagggatgtctgtgccagccgtctctactcctggctgttcagaggtaatacaaagtgaaacccataagaagcccccaggctatttgctggagacagattcaactgccagcaccctcagagacagagtctcattttttagcctgggctcacagcataagcagctcctcagctgatttccagaatcagtgcaacattcccaaagggagtcacttgtatcccagttctcaagataggtgagttctcaaggtacttgcagccgaaggcttagaagcacccaggacaaggagagaagggggtcagaagcactcattcattccacaaatgttaattgagtccatagtactggctgggcacatcccaggtgctggggacatgcagaggttacggagctggcattggagagggaagtcacgtaatggcaatgccgggctgtatatgattcatctgttctgaagctgatcttggatgaatcacctccaggaagccactggcatttattcatgcagccagcatctagttagtaccacaaataggctattgaactattacgtccactgcacttaaaagtagtaacttatctttgcagtttctgtatctgtgtttctcaaagcatgatccaacggtatgagattcacctcagatgtttttttcaaaatgcagattcctgggccctgctctagagctattagatcagactccctgggggtgggacctagaatcctgcattttttcacaagctttccagatgatttttatgctgactaaagtcttacagccactgttataagttgcagcatttgatattcataactaccaaggagatgagctcattttcccattttgcagatgagtaaactgaggctaagagaaggaaagcaacttgtccagagacacatagctgggggcagtatcagcgtgcacacccacctccagactcccagcccagagctcagtcacccccccacaacctctagggtcttccccagctccctcagaaggggtattactagttcagtccctatatctaaccctcctcctctttcttcacaccttccctgcagcttgaagaagaatacccacacctacttctacaccagctttgcagcctacatcttcggcctgggccttaccatcttcatcatgcacatcttcaagcatgctcaggtgggcaggacggtatcagagtgtcaggaatgcctcactgcaaatagagggacttacagagggatttatttgtaaatgcaagcagtccagagataggcactccccactggtgttggagcagtcatgtctgtgattctcttggccttccatttgtggttgcaagatggctgccactgctctaggcagcatgggcacgttagaggcaagaaggagggaaaagcgtaacagccatgcctgctgccttcatcaggaaggcaggaactttcccagaaccctttcagcatctcatgggccagactggggtcctaaagccaccctggctacaggagagtccaggaaagaggatttggcttctcagccttggtagtgggaagcaggcagagaagaacaggattggagtgggtgttgggtattggggcgtccctccccctactccctagtagaccaggctctgcctccttctcccaccaagatgaggatggagtactgagctgccacagaatgaagcaacatagcacaaagactgggagccctcagtgtggcctggagaggggaagattcaggggaaagtgagcagacaggattgccctactttctactggaaataataagagctcctgtttgttaagcacttccacatgtcaggctctgcactcatgaggatccttgtgaacaggtggggaaactggagttcaggtgacacactgcaagtatgtggtaaagccaggattcaaacctgggtcagcatggaaaccacacccaggctctcaagccctggccatgggaaacgcagcattgaacaggggctaagggagccctgttgtgaatcccagcaccacccagtaaccatggaactctgggcttgctgcttctgtcccctttccccttccccagggcccaaatacagacgagccatctttgaattaatcacaaaagctggggtttttttaatcactctgtgccaggcactgtgctaaactcttttgctaataactcatttagtcctagtacagtattactttatagaaggtcaaaaggcccctagcccataattagaaaaaccaagaacaaccattgtggaactgcctctcacttctgctcaagggcttcaatggcgtgtaaggtgagagtaacatgcgtatggcaagggtcacagagagtgactggacctggtttggaggactagttaagagaccttttggaggtctctgcagctcccggccccttattggagtccaagcccagagccaattcccccagtggccataaggtggcagcctcaccctctgcctggctggactgagaagaggctcccattcagagctctggcacacaggagtcctctcctttatcggaaaactgcagcgctgagagaacgcgaacactacatcaggctgggccctgggtggcgatctggactccagactaatgaactcctgaaccctgccccaaggcctgtgttactccccagcagcagcccagcccttctccccagtcatccaagtgggtacctctctgaaaatccttggaaaggggatccaggacatgaggggaccctgtcccatggggtcccctgctctccaacacacaggtagtcccagtgctagcattggtctaggtaagggtcacctctgcctttgtgcagtggtgtgatctcagctcattggagctccgcctcctgggctcaagcaattctcctgcctcagcctcccaagtagctgggattacaggcgtgcaccaccacacccagctgatttttatatttttagtagagacagggtatcaccatgttggccagtctggtttcaaactcctgacctcaactgacctgcccacctcagcctcccaaagtgctgggattacaagcgtgagccaccacacccatcctacttagggattgttagattcaataatttaatatacataaagcagtattgatcacagcccacctatgacagatggcaagaaataagtctgaatgttaggatcaagggcatgcgggaaagacttctttgttctctggccaagggctggctttacgttaagaatgaagtctccggccaggcgtggtggctcacacctgtaatcccagcactttgggaggccaaggtgggtggatcacctgaggtcgggagtttgagaccagcctgacctacatggagaaaccccatctctactaaaaacacaaaattagccgggcttggtggagaatgcctgtaatcccagctacttgggaggctgaggcaggagaatcgcttgaactgagaggcggaggttgcagtgagccgagatcgcaccactgcactccagcctgggcaacaagaaggaaactctgtctcagaaaaaaaaaaaaaaagaatgaagtttcctcaccctctccaggacaatctcttcacttcatgagcacccatgaagacgcaccatgaaggagccattcactgagtatttaccaggccctcttcagtatgcagggcacactacggtgagcaagacagctgtgggcccgccctcactgaactcaccacctatggggatgttccattacaaattgctggggaggccaggcacgatggctcacacccataatcccagcacgttgggaggcaaaagcaggtggatcacttgagctcaggagttcaagaccagcctggggaaaatggtgacaaccagtctctacaaaaaatacaaaaattagccaggcatggaggcgcacacctgtaggcccagcaacttgtaggactgaggcgagaggatcacttgagcccaggaggtcaaggctacagtgagccatgttcatatcactgcacttccgtctgggagacaaagtgagaccctgtctcaaaaaaaaaaaaattgctgaggaatgctgtgagggaaattagagggacttacagagcacgtagcaagggacctgactccatgtgaaagaactcaagtgcaccagcctggccaacatggtgaaaccgcatctctactgaaaaatacaaatattagccgggcatggtggcgcatgcctgtaatcccagttactcaggaggcggaggttgcaatgagccaagatcgcaccattgcactccagtctgggagacagagcaagactctatctcaaaatcacaaaaaaaaaaaaaaagaaaagaaaagaaactcggccaggcgcggtgtctcacgcttgtaatcccagcactttgggaggccaaggcaggcagatcacaaggtcaagagatcgagaccatcctggccaacacggtgaaaccctgtctctactaaaaatacaaaaaaattagccgggcatggtggcaggcacctgtagtcccagctactccggaggctaaggcagaagaatggtgtgaacctgggaggcagagcttgcagtgagccaagatcacaccactgcactccagcctgggtgacagagccagactccatctcaaaaaaaaaaaaaaaagaaagaaactctttgggctgggcgtggtgcctcaggcctataatcccagcaatttgggaggccgaggcaggtggatcacctgaggtcaggagttcgagaccaccatggcgaacgtggtgaaaccccatctctagtaaaaatacaaaaattagccaggcgtggtggcaggcacctgtagtcccagctactcaggaggctgaggcaggagaatcgcttgaaccctggaggcggaggttgcagtgagccaagattgcaccattgcactccagcctgggcaacaagagtcagagactctgtctcaaaaaaaaaaaaaaaaaaagatttgggtctctgagtcctgggctattttccctctccttgtgaagcattggtcttcctcctctgcaaaaggataaccatcatgggatgtggcagtgggctgacttcctgggaaggctaagctcagtgcctgcacagtagatgttcatgaacagggtcttagtataaccgtccttttctccaaacccagctttaccaggagtctcagcacagacatgccaaattgcttgggtgtgaatcctgggggagccagtgaccagctaggtcaccttaatacaggctgcaacaagtagttattacatagcagctgtggtgtcatcatcactataatagcatctcctggagcatttgctaaaatgcaggtgtgagccccagacctcaggaagcagagtctctgggagtaggaccaaaccaggaagttgctttttgaacctggtgacctaggtgattcagatgctgccagccaaacccctgggaacccttgaagccctgcctacttgagtttcttagttttcttgcattccctctcgggaggagcaacccttgtctgggagttaggagccctgggttcaggcccagccactgacttgctatggtcctggaccagtcactgtccttcagtccagcccagaaggggtttggggtgctgggcacggccctgaggcagtgccgtgcccagcatggcttcaccagcctgtgtcctctcatagcctgccctcctatacctggtccccgcctgcatcggttttcctgtcctggtggcgctggccaagggagaagtgacagagatgttcaggtaaggcagagtggggggcagatgtcctcatgggcaccagtgtgcctgctggcagtcagtggaacctgctgggggtatctttacacctctccaggggaacattgttcctgccaccagccccaccccttgcctttttcagcagtacatgggtacctggcctgtggacaccagtgggaaccttaccctgggccaggagccaggggagcgcaaggcatcagagccctctaggcatcccccatccaaatgttagctggatcttaagaatagctgttgtggatttttctctgcctactgtcagaagtcctaggtgactctgcccccaggtgacttcaggcatgtcttcccctcccatggcctcagttttcacatgtgagtaatagaacagggggcgtgtgggatgccctagtgtggtagaaagtgccccgagtagaaggcaggtgtcagtccctgttcattcacctctgtggctttaacccacagctcactgctttctctatatctgtatctcacacagataccccttccccagggccatatccacacctaccacaccctgcacacagccccacccataccgcaaggcctgcgtgactccaacaggtgtctgcccccagcactgccgaccctgcctgccagggacctagaaatagctgtcagttgcgattaaagctgcctactcgggtgccttccgcccagttccacctgcctggcctccaagctgtccctagagcgcttgccagggcctcctgtgcacctggctccccgcaggggagcctgtgactcacccctcccccggacctgcctctgccctccctgtcctgtctagaatccccagccccccgcctgcctgcccacattgcctcgcccagcaaagctctgtggtctgaggcaagtgggggctaggggtgaacttggggacaggtctcagggagctttgggagcaggcatggcacccgatccctgagcttagcacccatccttcaccctccctctgcttcccatccagcccaggtttccctgcccctccccttggggtaaccacccaatgctattgtgccctcatcaggcaaagctctgaatacacaaggcagagggtgcccctggcctttacctgcttggtgctaaatgctctgccatacaggtaccctgcccccactgtttgccctccactcccaccctggacattcttagattggggtaaaaagcaagtgatctctctctctctctctctccctcctttctccccatttctctcccaattctccacctttttacttttcccttctattctcctcctttttttattgatttacttatttttatattggtaccacattcacatagttaaaaattccaaagctgtaacagagagagcaccctcatgctccagctaccccacagaggccagcagtgttacacagacattcagacacctgtgcactgatgtgtgtatactttttcttgcacagacggtggcattcttggagcattctgcacattgggtttctacggtatttcttagaggtgtttccacagcagcacatacacttctagagcatgcttgttcttctgcacagtggcctgatgtgcctttgtctaggtgcatctttcttttttcattctccaaataatatcagcttctttccataaaatctggaagtgcaaaaataggtaaaaacaagacagttctgctctctgctccttggaaaggaagtctctgtcctcccttagtctttccctatccatctctttttttctgtctcttctctctctctcacacagctacgagtcctcggcggaaatcctgcctcataccccgaggctcacccacttccccacagtctcgggctccccagccagcctggccgactccatgcagcagaagctagctggccctcgccgccggcgcccgcagaatcccagcgccatgtaatgcccagcgggtgcccacctgcccgcttccccctactgccccggggcccaaggtagggcagacactgcagctccagtgcatagggcagggaccattgccaggagtaggccgcaagagcagctcctccacaaccaccaggcagtggttgcaccgagccatagggctgggaagcaggacaaccccgaagcttcctgccctcaccagtaatgcggggcccacatcatagtggatggaaatggcccttgtcatgcagtagtagatactgttaccattcaaggtatatgtataaccttaggcaagttactttcttcatctgtaagtgggcacattcctgcctcacggggtttatctggtgaggaaagatttgtattatctttggcatgaactcagttgcttgaaaaatgaagcccatagaagaagctaagccagggtgtctgtcttcagagcagcaccttgccgcttgccagtacagcagtgccctcacctctggggctgagctgtttgattcatgctgtgtgccctgggaggcagcctatctccatctcttgtagccttgtcatggccacccctttttccacgctacagcagaaggttcaggaagcttgaaatcagcccacacaagcccaggcccaacctctcttccattggctgctgcccttgctgcctcctggtacccccaggctcagagaaagcagagcagcctgcctgaggagggcatgtggtagggctggggccaggcgctgttaggtgctgggcagtggacacagggctgacgctctgcatgtgaccaggcgctttcctaggatgggggtgggggaaggggacaaccaaggttctgctcaccctctcctctaaatgaatttttattgttgtttttttttttttggtcagttatgaggagtcaaatcctaaggatccagcggcagtgacagaatccaaagagggaacagaggcatcagcatcgaaggggctggagaagaaagagaaatgatgcagctggtgcccgagcctctcagggccagaccagacagatgggggctgggcccacacaggcgtgcaccggtagagggcacaggaggccaagggcagctccaggacagggcagggggcagcaggatacctccagccaggcctctgtggcctctgtttccttctccctttcttggccctcctctgctcctccccacaccctgcaggcaaaagaaacccccagcttcccccctccccgggagccaggtgggaaaagtgggtgtgatttttagattttgtattgtggactgattttgcctcacattaaaaactcatcccatggccagggcgggccactgtgctcctggaagattctctgtttaagcacccagtgtcttgccctgggttttctaggtctcacctgcccacccaaaatcttttctgcaagccccttaagggtgcccaccccagtgcctggccagccctgcacccgtaaaacaccttttagccagtagagggggcccacgagccctctctcaccagctagcacttttctcaccaccttcctcgaaatacttgggggcagcaagggtgttggcagatgagagtctcccactcaccatggtgagagtggtggggagtacccagggctgacctgactcacaagggaagcagtaactgtagaacctgccagcctccctggtccctgtgcccatatggcttcggctgatgagggctcagactctaggttgccctgaagatcaaggctttgtctcccattctgcccattcctgggtttcttcccaaaatgactactgtggggccagtcatggcacaagggccaggacctctagaggctggggtggggaaggactgagctagtgattcttagaggccttctggggcctaagagctgaaatctcagcgcccgggtttccctaaagtttgctgaagacagcagccccggccagcaggagaccgaccgggcaccaccccaaaccaggcaaacggtggccacaaccctcatccacccacctggtatgaggtcactgagtggggaaacagacaggagcgggtggccaccatactgacagacccggggctctcccttgcccaagcttcaggttcaaaggctgaaaataacagtggcttccagtttggaagtggccaaaggacaatcatgaccagagactcaggagtatgactgtaataccctcactaggtattgacatgcactaagcaccttgatataggatttcacttccttctgagtcttgggctgtatgtgctattattcgctccgctgtgcagatgagggaattgaggcagcttgcccatggacatcgatttgaccttagccaagccaaacaattccaggttcctaaggaccgcagctcctccccagacccctgggaccaagtcactggctggtgtgctgggcatccctgagccccagccacccaattttactggctccagggttctataggaaggaaaaggggtagaaaatttcaaaaggcttcttcctttcagggaggggggttccctttcaggggcttctggaatctctacccactccagccaactctgaggccatgtggtcctggaacaaggcccctctgaggcagatggggcaggcggcccaggcacatagcatggttggctctgcggcccagggcgcacaaaggccttattgagtcaccaccagcccccggcagaggctgaggtggcagtggcgccgagcgcctgccacctaatgactgtcctggtccagccagatgttccacagacctccggagcagcggactagggcccgcccggccagccggcaccgcagaggccactgtaattccaattaaccagcttcagctgagcaaacagcgggcagtggtggcccagcccaggcggtaggcctggcccgcagagcctgcgagtctagactccagatgtgaaccgccaccatcagagtcccatggaaaaatggcaccaggccgggcaaggattgggcctgcatgctggggagggggtgtgggtggttgggcagggccccgagtgggctagatgccagcctcacctggtttggggtggattattaggaaactgctctagaacccaagttctaccctgctttattagattctgtttctgtgcctcagtctcccatgactgcgacaagagagagggttccaaggggaaaaccagccctgctgagaccccagtgtgcactgactgtatttcacgtgactagcattatgctagtgcaactgacccttgaacaacacagggattaggggcaccaacccatcatggtcgaaaatctgtataacttttcagtcccgcaaaacaactaatagtctgctgttgaccagaagccttacctgataacataaacagtcaaaacatcttgtatgttatacgtactacactgtctaccatagagtaagctagagaaaatgtaattaagaaaatcctaagagccaggcatggtggctcatgcctgtaatcccagcattttgggaggccaagatgggcagatcaggaggtcaggagatcgagaccatcctggctaacatggtgaaacccccgtttctactaaaaatacaaaaaattagccgggcatgatggcaggcgcctgtagtctcagctactcgggaggctgaggcaggagaatggcctgaacccgggaggcagagcttgcagtaagccgagagaggcaggcggatcacaaagtcaggagttcgagaccagcctggccaatatggtgaaaccccgactctactaaaaatacaaaaattagcctggcatggtggcaggcgactgtagtcccagctactcaggaggctgaggtgggagaatcacttgaacccaagaggcggaggttgcagtgagccaagattgcaccaccgcactccagcctgggggacagagtgagactccgtctcaaaaaaaaaaaaattattcagtgaaagtggatcatcataaataaagatcttcatcctggtctctgtgttgaggaagaggagggggttggtcttggtgtctcaggggtggcagaggtagaaaaaaagtccacgtttaagtgcacctgcacaattgaaacccgtgttcaagtttcaaatgtatcttaagatttacttaatcgttgtaacaacactttgaggtacctacatcattcttacgatggggaaactgaggcagagaccgtaagggcgggcccagggggcatgtgaacccagagtgtctggcttccaagactcgtattcaccgtggtgccgtttgacatgatcaggataatggatccctggttccttttgggggcagcattggagaagggggtttggcaccgtcagtctgacagcagggctggctcctgcagtgtgaatgaagcggtcttgtgctcgactgtgaaggggggttaggacctgcttcccagggcgggtccagctttctgagggaaagccttcagagcctccatcaggccggcaccaggtaccagttaagcactgggcagggaacagaagtggtcaaacgccgcttgccgcgacttgaaactgctgaataaatggataatgtcaagcgctatggcttagggcagtagtacctccggttcctacgatcgtgtctggggtccctgaggagcaaggcaagagtcggccattcaggaggtcagagttcagctgttcttgcacaagcagggaagctgagtcaccccaaacacgggcaagactagcggtggtatcaaatggctatcaggggcggggcctcaggggcctgcccctgcctccccgccctgcgtttggattccctccagcattccgggccagggcgcgggaggcggaggccgaggagaggacgggaggaggctgcatcctgccctggtgcgtcaggaagggccgagcgagcgggaaggaaagcaccaccccccacccccgccgcggccacacctgggttctccaggcgggcaggggggcccccgggccggcgcctggctccagcaagtctgggccgcctccccgcgccgccccgcgggggccgccagatgggctgcccgcccgccagctcagcgacgcaggcaggaaacgccggccgggctgccaggaacgcgcgcaggggagggggcgggcccggccgggccacgcccgccggaggggaaggaggggccaagcaccgcccggcggggactggtgagctccaagagcctgcgatcccggtccctgcctttactagatgggtttccttgggtaggtcgttttacttctctgtgcctcactttccctacctgtaaagcggggctgcctgtctccgctctttttcccttttctcttttatttgtgcagcagggtttcactctgtcgcccaggctgaagtgcagtggcgcgatcacggcccactgcaacctcgacctcctgggctcaagcgatcctcccacctcaggtgggaatataggtgtgtcccaccacgcctggcttttttttttttcccctagttgaaacggcggttctcactcttgctcaggctggtctcgaactcaggctcaagcaatcttcccacctcggcctcccaaagtgctgggattagaggcgtgagccaccgcgccgtgcctcagctattttcgtgtgaccgtgtgatctcaggacactttctttcccttctcttccttggttttcttacctgaaaaatggggtgaacaattgaacctccctcaaccatgggctaagcctttgttttcctctccaccgtagccccaacacttggcccattgcctgaaacatgaaggcactcagtatttgttgtaagagtgactataaaggtttgggacaatcctgagggcctggctacagcaggcacttcataaatggacacaaattatcaaattacctagagtctaatgtttaccaacctgcggcttcaggcaagtgacttcccatctctgagcttcactttcctcgtctacataatggctgtgaggattaagtaaaataaataaatacatggaaatcacacatagtgtgttctcaatagatatttatggaagagtctccaaaatattaaaaaaagggagatactattttgagtaaatttgagggcaaggaatatacaaaggagttaggtggcttggaagaagatttttgctatatatgtaaactaagctgtgtgtgggtgggtattttgcttgttggtttttgagacaggctctcactgtagtccaggctggagtgcagtgtggcagtcatagctcactgtaaccttgaactcctgcactcaagccatcctcccacttcagcctcctgagtagttaggactacaggtgcgtgctaccacaccctgctcactttgcattttttttttattttatttatttatttttttgagacatagtctcgctgtgtcgcccatgctggagtgcagtggcgcaatctcggctcactgcaagctccacctcccgggttcatgccattctcctgcctcagcctcccaagtagctgggactacaggcgcccaccaccaccctggctaatttttttttgtatttttagtagagacggggtttcaccgtgttaaccaggatggtctccatctcctgacctcatgatccgcccgtctaggcctcccaaacatgctgggattagaggcgtgaaccaccacgcccggcctcattttgtatttttaaaactttggcccgggcgcgctgtggctcacctctgtaatccagcactttgggaggccacggcaggcagatcacgaggtcaggagttagagaccagcctgaccaacatggtgaaaccctgtctgtattaaaaagaaatatggtcaggtgcagtggctcacgcctgtaatcccaacacttcgggaggccaaggcggactgatcatttgaggtcaggagtttgagagcagcctggccaacatggtgaaatcccgtttctactaaaaatgaaataaaattagctgggtgtggtggcacgcgcctgtagtcccagctactcgggaggcagaggcaggagaattgcttgaacccaggaggtggaggttgcagtgagccgagatggtgccattgcactccagcctgggcaacaagagtgaaactccgtctcaaaaaaaaaaaaaaaagaaaagttttttaattaggctggacatggctcacacctgtaatcccagcacttgggacgcaaaaggatgtagaatgcttgaggccaggagttcaagaccagcctgagcaacatagcaagactcctcccaatctctaaaaaattttcttggccgggcgcggtggctcatgcctgtaatcccagcactttgggaggccgagacaggtggatcacctgaggtgaggagctcgagaccagcctgaccaacatggtgaaaccccgtctctactaaaaaatacaaaaattagccaggaatggtggtgggtgcctgtaatcccagctacttgggagcctgaggcaggaaaatctcttgaacgcgggaggcagaagttgcaagtgagccgagatcatgccattgcactctagcctaggcaacagagcacgactccttatcaaaaaaagaaaaaaaaaaaaaggtcgggcacagtggtttacgcctgtaatcccagtactttgggaggccgaggcgggtggatcacgaggtcaggagtttgagatcagcctggccaacatggtgaaagcccatctctactaaaaaaaaataacaaaaattagccaagtgtggtggtgggcagctataatcctagttacttaggaggctgaggcaggagattgcttgaacccaggcgggagaagttgcagtgagccgagatggtaccactgcactccagcctgggcaacagagggagactcagtctcaaaaaaaaaaaaaaaaaaaaattaggctggacacggtggctcacatctgtaataccagcattttgggatgccgaggtgtgtggattgcttgaggccaggagtttgaaactatcgtcggcaacatagcaagacttcatctttacagaattaaaatttaatattagccagaaatgatggcacacacctgtagtgtcagctactcacgaggcagaggcaggaggattgtttgagccaaggaggactgcttgagcttgggaggtcaaggctgggtgagccatgatagtgccactgcacttcagcctgtgcaacagaccaagaccaggtctcaaaaaaggccgggcaccatggcttaagcctgtaatcccagcactgtggtaggccacggcaggtggatcgcttgagcccaggagttacagactggcatggacatcatggcgaaactatctctacaaaaaaatacaaaaattagccggatctggtggctcacacctgaggtcccagctactcgggaggctgagatgggaggatcacctgaactggaggtgagccatgatcgcaccactgcactccagccttggtgacagagaccctgtctcagaaaaaaaaagaaaattagatgtaaaaaacattgaaaataaaacagcacatttggccacccatagattactttcagatttttttctatgctttttttttttaacccaaatcagatctaaatgaagtattttttccatagttaactttcttcccatttcagtcagttgccatttcatctcacacccagacagcatccaacctttgtcattttaaggcagacaggtgtgacaaacaaggctatcttcatgtgaaggcagacccctgcagagaatgcctggtggagtctttgatgggccctccctactgccttcccaaaaccatgggtcccagctctgtgccccctgggatcagcccagttgggggtacccagcgaaggtgctgcttcaagacccccatgggcctgtccacctcagacaggtgctttcctttgctgccagacccccatgggcctgcccacctcagacagatgctttcctttgctgccggaagctggccacccaccccctctcaggctaccccaggtcccagctgggctctgaagtgcgggaggggaggtggaggcactggtaacactcagatgcagaggtggtgagggaaaacccagggtactgagtctggaaaacagatttcttaggtgtggactttgggggagaagctgagcctctttctgcctgaccgggatcctttcttcttgacaggttctctatgcaactatgcgtgcatgttgcggggacggggtaggtgtttgactgacagtgtctgctcctgtgagaatctattctgatggaccgggtttggtggctcatgccagttatcccagcactttgggaggccaaggcgggtggatcaccttaagtcaggagttcacaaccagcctgctcaacatggttaaactaaaaatacaaaaattactccggcgtggtggcacacacctatagtcgcattgtgtctgtaattggcaggttcttggtctacactgacttcaaaaacgaagctgcagaccctcgcagtgaatgttacagttcttaaaggcagcgtgtctggaatttgttccttgtgatgttcggatgtgctgggagttttttccttctggtgggttcgtgatctcactggctcaggaatgaagctgcagaccctcgcggtgagtgttacagttcttaaggcggcgtatccggagttgttcgttcctccccgtgggtttgtggtctcgctggcttcaaaagtgaagctgtagacctttacagcgagtatcacagctcacaaaagcaatgtggaaccaaacagcaaaaaaaaaaaaaaaaaaaaaaaaaaaaaaaaaaaaaaacaccaccacacacacacaccccatgcagaaaggaaccccagtacattaccactgcagagccgggcagcctgcttttattctcttatctggccctacccacatcctgctgattggtccattttacagagagctgattggtctgtttcacagagagctgattggtccgttttgacagggtgctcattggtgcttttacaatccctgatctagacccaaaagttctccacgtccctactagattagctagatacagagtgctgattggtgtatttacaaaccctgagctagacacagattgctaattggtgcatttacaaaccttgagctagatacagagtgcctattggtgtattcacaatcccttagctagacataaaggttctccaagtccccaccagattagctagatacagagtgccgattagtgcatccacaaaccctgagctagacacagggtactgattggtgtgtttataatcccttagctagacataaaggttctccaagtccccactagactcaggagcccggctggcttcaccctgtggatcccgcacaggggctgcaggtggagctgcctgccaatcccaggccgtgtgccgaccgcactcctcagcccttggggggtcgatgggaccgggcgccatggaggagggggcggcgctcgtaggggaggcttgggctgcacaggagcccatggggcgggggggcatggcgggctgcaggtccccagccgtgtcccacggggaggcagctaaggcccggcaagaaatccagcgcagcgccggtgggccagcactgcttggggacccggtgcaccctctgcagctgctggcccgggtgctaagcccctcactgcctggggcggcgggccggccagccgctccaagtgcggggcccgccaagcccatgcccacccgggactctagctggcccgcaagcgccaggcgcagccccggttaccacccctgcctctctctccacacctccccgaaggctgagggagccggctccggcctcggccatcccaggaaggggcttccacagtgcagcggcgggctgaagggctcctcaagcgcagccagagtgggcgccgaggccaaggaagccccaagagcgagggagggctgccagcacactcacctctcgccatctactcaggaggctgaggcaggagaatcacttgaacctgggaggcggaggttgcagtgaactgagatcgcaccactgcattccagcctgggcgacaaaatgagactgtctcaaaaaaaaaaaggagagtctatgctaatgtttgggtttctacaagttgtgggtaatggtaaagttgaaatcttacgtggaccagtgctgtagatgggtttctatatggttgtgattgtgaatgcatgattgtgtgtttgtgtctaagtatgtttaggagtatgtgtttctgagaacatttgtgagcaagtgcctgcattggtgggtgggtgtgtgtaattggtgtgtgggtataagagagacagatcatgtggaagtgtttgggttgataaaagggcttttgcaagggcattgcctgtgcgagtttgtgaatgtgtgctgtcccatctgcttgcttgcttgttttttttcttttttgttttttgagacggagcttcgccgttgttgcccaggctggagtggaacagcgggatctcggctcaccgtaacctccgcatcccaggttcaagcgattctcctgcttcagcctcccgagtagctgggattacaggcatgcaccaccacgctcggctaattttgtatttttagtagagagggggtttctccatgttggtcaggctggtctcgaactcccgacctcaggtgatctgcccgcctcggcctcccaaagtgctaggattactggtgtgagccactgtgcccagccctttctgcgtgtgtgtgtgtgtgtgtgtgtgtgtgtttcaggtcttgtttctttggttcatgcttccctttgcctgggtcatcccccagtggtgcagtcacagctcactgcagcctcaagctctcaagctcctggtctcaagcaatcctcccacctcagcctcccaagtagctagaactacatgtgtacaccactggcctggctaattttttttttttttttttttttttttttgagacagtgtctgcctctgttgcccagggtggagtgcagttgcgcaatttcggctcactgcaacctccgcctcccgggttcaagcgattctcctgccacagcctcccaagtagctgggattacaggtgcacgccaccacgcccggttaattttttgtatttttagtagggacggggtttcaccatgttggccaggctggtctccaatttctgacctcaagtgatgcgcctgccttggcctcccaaagtgctgggcttacaggcgtgagccacaacgtccggccaggctaattttttaatatttttgtagagacgggatctcactgtattgcccaggctggtctcaaactcctatcctcaagcagtcctccttcctcagcctcccagagtgctgggattgcaggcatgagaccccgcacagtctgtttctacagcggcctctctgcggcttcctctcttctggcctcatggagaaaccccagaaagagcatagactctggaattagagaaacagggtttggaattctgtgccattctctccctgtgtggtttggccaactgattcaaaggctgtttcctcatttgtaaaatggagatatatagtcagtggtccttgttattatctccctgctacctgcccccttcccaaacaccagccagtcttctctgctctggccaaattgataatagcttttgtttttcaagcctaaaaccagcttcttccaatttgctcagcagctatttgctaatcatccagagtgacctaggacgtatttacatgagcggaagagccactcggggagagtgctgctgggaatgcctccacagagatgctgattgtacgcatgctgcgtaagcctcagatttttctgttcaggcccaaatgcgcagcacaatctgtgggaaagttgcaacagagaaagcaaaaaaaaaacaaaaagcaaaaaacgagtttttacttccttaataaaattggttttggtgctcactttggcagcacatatactaaaattggaactagacagagattggcattgcccccgagcaagaatgacacgcaaattcgtgaagccttcaataaaaaataaaataattttgttttcccaatctgtgtctcttttaagccccacaggatagaaatgtcctaaaataagaaattaaataagaggggaagccccatgatctgttctggtttttttgggtggtggtggtggtggtgttttttaatgggtctctcaggattccaccagacccacttcccagccgctgtgtggtctgggcctgagaacaccaagccccccgacctgcggcccacgcccacccaccacccagcctcggcagtgctttcccaggattcacatggtaatgaaggcatccatcttctcccagacacacactgggccctgcgaccctcccagggcccacacaatggcccacagcgccgcggccccaccacctgttggattttcccagggaagggagtgagggggtggaggggaagggcagtccgtctcttcccagcccccagccccatttgcaccctggtcgcaagagtcagtcagcgagggcacccatgtcctcggactctcagtccatcctcagcaccctgtttcctcatcctcaaactgcaaggtggttgggaggattctaatgggaatggtagtaaggacacgctcaggaactgtggattgccagacaaagagagcaaaaggccgggcgcggtggctcacgcctgtaatcccagcaccttgggaggccaaggtgggcggatcatgaggtcaggagttcgagaccagccttgccaaaatggtgaaactcccatctctactaaaaatacaaaaattagccaggcgtggtggcgcgcgcctgtaatcccagctactcaggatctgaggcaggagaatcgcttgaacccgggaggcagagcttgcagtgagccgagatcaccccattacactctagcctgggcaacagagcgagactccatctcaaaaaaaaaaaaaaagccatcaataataatgaacttgataatgactaattaataataaacaggctcatgcctgtaattctgacactttgagaggccaaagttcaagcgggaggattgcttgaacccaggagttcgagactagcctaggcaacatagcgagatcccctctctacacaaagtacaaaataataataataaacaataataaggccggacaaggtggctcacacgtataatcccagaactttgggggtggaagcaggtggatttcttgaggccagtaacttgagaccagcctgggcaacacctgtctctaaaaaaatacaaaaattgggctgggcatggtggcttccgtctgtaatcccagcactttgggaggctgaggcaggcagatcatgaggtcaagagatggagaccatcctggccaacatggtgaaacccaatctgtactaaaaatagaaaaattagctgggtgtggtggcatgcacctgtagtcccagctacttgggaggctgaggcaggagaatcccttgaaccaggaagcggaggttgcagtgagccaagatcgcgccactgcactccagcctggcaacagaacgagactccgtctcaaaaaaaaaaaaaaaattggccaggctgcagggctcatgcctgtaatcccagcactttgggaggccacagcaggtagatcacctgaggtcaggagttcaagaccagcctggcgaacatggtgaaaccccatctctactaaaagtacaaaaattaactgggcgtgttggagggtgcttttaattccagctactcaggaggctgaggcaggagaatcgcttgaatctgggaggcagaggttacagtgaaccaagattgcaccactgcgctccagcctggataacagggtgagaccctgtctcaaaaaaaaaaaaatatatatatatatatatatatatatatatatatatatatatatacaaaaattagttagggcccggcgcagtggctcaaggcctataatcccagcatgttgggaggccgaggcgggcagatcacgaggtcaagagatcgagaccatcctggccaacatggtgaaaccctgtctctactaaaaatacaaaaattagccgggagtggtggtgcgtgcctatattcccatctactcaggaggctgaggcaggaggagacttgcttgaaccccagaggcagaggttgcagtgagcctagatcacaccaatgcactccagcctagcaacagagtgagactccgtctcaaaaaaaaaaaaaattagctgggattttagatgtgtaccaccatatccgactaatttttatatttttagtagcgacggggttttgccaagtaagccaggctggtctcgaactcttaacctaagtgatctgcccacctcggcctcccaaagtgctgggattacaggtgtgagccaccacacacatctgagttgtacaatttaaatgggtgaattgtatggtatgtaaatcatctctcaataaacctgttaaagaaaaaaaagggggctgggcgcggtggctcacacctgtgatcccagcactttgggaggccaaggcgggtggatcacgaggtcaggaaatcaagaccatcctggctaacatggtgaaaccccgtctctactaaaaatacaaaaaattagccaggcgtggtggcatgtgcctgtaatcccagctactcaggaggctgaggcagaagaatcgcttgaacccgggaggtggaggttgcagtgtgccaagattgtgccactgtactccagcccgggcgacagtgcgagactgcatttcaaaaaaaaaaaggtaaattctagaaatgctcctgtttctgagcatccagtacaatgataaggcaatcactacctccaaggtccccacttcccatatccctcccccactgcactcccatcccacttccaggtggctatgactgagcaactattagacctaattaatcatgggtccaggtgagttttgcccacttgttgttcacagatgtctccaaactacacaatctcagagtgggtaaaaaccccagggccatagggctttttttaatcttttctggatccagacctctcccctttatattttaatttcatttcatttttgaacatgtattacctaatacatgttcctgatacaacgctgaaaaacaacggatgtctcccttcttccctattggaggcagccacagtcatcagtttcctagtgagatacaagcaaatacatatgtaattttgtttgtttgtttgtttttttaagaaactgggtctaggctggcctagaactcctgggctcaagtgatccttggcctcagcctccaaagtagctggagctacaggagcatgccaccatgctccacttcagacacaagtggtgtttccatacagggtcagttaaaaacaacaaaaaacactgatggtgatgagacatgaatactaataggtggtcacatgagaatagaaaattgcaggctaggtgtggtggctcacacatgtaattccaacgctttgggaggccaaggaaggaggacctcttgaggccagaagtccaagaccagcctgggcaacatagtgaaactccgtttctacaaaaaaatacaaatattggccaggcgtggtggctcacacctgtaatcctagcactttgggagactgaggtgggtggatcacttgaggtcaggagttcgagaccagcctggccaacacggtgaaaccccatctctactaaaaatacaaaattagccagacgtcgtgaggcacacctgtaatcccagctacttgggaggctgaagcaagagaatcggttgaacccaggaggcagaggttgcagtgagcttagattgtgctactgcactccagcctgggcaaagagcaagacaacatctcaaaaaaacaaaacaaaacaaaaaaaaacaaaaaactagccaggtgtgatagtgcaagcctatagtcccagttcctcaagaagctgaggcgggaggataaattgagcctgggaaatcggaagccttgactcccatttctggatgggagaggtagctaaattttttttttttttttttttttttgtgacggagtctggctctgttgcccaggctggagtgcagtggtgtgatttcagctcactgctacctctgcctcctgggttcaagcgattctcctgcctcaggccctgagtagcttggattacaggcgcctgccaccacacccggctaatttttgtatttagtagagacagggtttcaccatgttggccaggctggtcttgaactcccaacctcaggtgatcctcccgcctgggcctcccaaagtgctgggattacaggagtgagccaccccgcctggcgcctaatttttatcaccagatgagatcacagatattgcacttactgtgttgtcccccacagaataaaaaccgcacaagactgagacttctgttgattctgttcactatatacaagcgtaaaaccaaaaataaaatgctaggggcccccaaccatctgaacggacccctcctctctgccaagagcattccaaaatgaatttgaaaaatgagtttaggccatgatggaagcgggtgagggggaagcgtcgaacttgtctcattacaccctccttccttttggaattcaggaaaagctgactagcattaacatcaacacagacgttaagtctgataagaaacatttacagtctattcttacttaaacctgccacctggaggtttcatctgcataataaaaccttggtcgccacaaccacttattgtaacccagacattcccttctacaaccctgggcacactcctgaggctgtgtcatgggtacatccttaacctcggcaaaacaaaagttctttttttttttttgagacggagtcttgctctgtcgcccaggctggagtgcagtggtgcaatctcggctcactgcaacctccgcctcctgggttcaaatgattctcctgccccagattcccaagttgctgggatgacaggcgcgaaccaccatgcccagctaatgtttgtatttttagtagagatggggtttcaccatgttggccaggctggtctcaaactcctgacgccaggtgatccatccgcctcgatctcccaaagtgctgggattacaggcgtgaaccaccaagcccagccgtttttgtttgtttgtttgttttattttttcaatgtagagacagggtctccttgtgttgcccaggctggtctcaaactcctaggcccaagcaatccatctgctttggcctcctaaagtgctactattacaggtgtgagccactgtgctaggccaaaataaactttctaaattgattaagacctgtttcagatgcttttgggttcacaccagtcataatagattagtacaacaacaatattctgctcactgtaatatgccagcgctggcccacagcctggcaagcaagagatgctccacagcttccagaatcctggactccagccccagccctgcctggtactcgctgccaccgtggacaagttacttatcactcaggagctccctgttcatagtccctcacctgaaagggatttttttttgagacggagtctcaccctgtcgcccaggctggagtgcaatggcgagatctcggctcactgcaacctcagcctccgggttcaaacgattcttctgcctcagcctccagagtagctgggattacaggtgcccgccaccacgcccagcttttttttttttttttttttttgtgagacggagactcgctctgtcgcccaggctggagtacaatggcgtgatgtcttctcactgcaagctccgcctcccgggttcacgccattctcctgcctcagcttcccgggtagctgggactacaggcgcccgccaccaccacgcccggctaattttttgtatttttatagagacggtgtttcaccgtgttagccaggatggtctcgatctcctgacctcgtgatccggccgcatcggcctccgaaagtgctgggattacaggcgtcagtcaccgcgcccggcctacgcccagctattttttatatttttagtagtgacggggttttaccgtgttggccaggctggtgtcgaactcctgagctcgtgatccgcccgccttggccttccaaaatgctgggattacaggcgtgagccaccgcacccggcggattgattttttttttttttttaactttttcattctgtctcggctgcttaaatcagaatagagacgaccttcagcacagagtggctgtaagaattaaataagataatgctttaaagcgctggtaagagctttataagtatcagcgaacactgctgccactatgctcatggtggtgtggcagacagcggggtgcagaagaagaggggtggggggaaggcggtcacatagggcaggggggttcagaccagattcctgagatgtcatttttagtactctccagcaagaaggtgggacggctggtgtggtggaggaggctagaggtacaagcttcacctgagatgtccttagaccctgacctcagctcccaccgtcctagtggtgccgggcggcggccacgccagccgcaccttcccccggccagcccagagctgccgctggggaagggcggagggaaggcaagctggtttttcccaggctccccccgctcctggaacatctggccgcgaacatctgcccttcgcttttgtggcgcggccgcaggccggcctcgcacccatctgccgcctcaccggcccccgccccatctgcgcgccgctcccctggggcggttcctggcgccctcgcccccgcccgccgggcctggttcccacgggccgagtgcgggaagccggggcggcccatctgccgcgagcggctgccaggcgcggcgagtccagcgccgaggcgtccccaaagggcgggaccggcgcccagcaatgtctttcaggcgggtgcgcccccgaacaaagtcggggtgcacggcctctccccgcgcggctggacccaaagtcgctgcccggggctgctgggtccaagagcggccgccgcccctcctgcttctccccagaagggcccgcgtgcccccgctgtccgccgcccaacacccgctcttcctcctgcaccgaacacttcgggctcactgacgcgccgtctccatcctaagccccaaaccttcaaagtgcaggagacaactgtcacgtcaccctgcaaaaaatgctaacgtctgataatataaaatgctggtgtggacgtgggaaaatagaaactcccaactgcgttggcccctcagcctggaataccccttgtcctcattgcctgcttaactcttgattttgtgaaatataaaaagtaccgagaaatatagcgatttatgttcctaataccacattcccaccacccaggactgacaactgtcagctgtatttgcgcctatttctcctcctccaaagaacaaacctttacagatagtgctcctgtctttttgtgttttttgttttgttttgctttgttttgttttgttttgttttgttttgagacagagtctcgctctgtccccaggctagagtgcaatggcgcaatctcggctcactgcaacctctgcctcccgggttcaggcgattcccctgccccgtagtcctccccagtagctgggactacaagcgcatgccaccacacccagctaatttttgtatttttagtagagacggagtttcaccatgttgtccaggatggtttcaatctcttgacctcatgatccgcccgcctcagcctcccataaagctgggattacaggcatgagccatcgcccccggcctttttgtgttttttgtttgtttgagacagagcctcactctgtcacccaggctggagtggtgcagtggtgtgatcacagctcactgcagccttgaactccagggctcaagggatctgcccactgcagcctccacagtagctgggactagaggtgcccatcaccaggagcagctaatttttgttttgaagagacaggtctcactatattgcccaggctggtctggaagtcctgggctcaagtgatcctcctgccttggcctcccaaagtgctgggattacaggcatgagccagcaaaccgagccactagccttcttttaaccagggccctcttcccttttctctaagactatttgccaccccacccaccatgcaatcccccaattactattaatataatgacttgggtgttttcttccgggttatgtttcttgttacttttactacatgtaaatatattagcattgtgtgtttttttaaatttatacttctaaaaaaatcattctgcattttccctaagcaacattatgcaggtatctagcagaatacacacagacgtagctcattcctgttcaatgctgggtacgattccatcaccatttccctgttttcttgtcattggacaagtaagtagttttcaatttttgggttttttttttttttaattaaaatagacatggagtctcgctatgttgacctggctggtcttgaactcctggccttaactgatcctcccatctcggcctcccaaaatgctggggttacaggcatgagccacttgcaaccggcctagttttcaatttgttgttgttgtagaaatggctgtcacattcttgcccacatctgctttcttgtgtgcaggcctcccagggtatgtccgtgggagtgaatcactggctcatagggtgttttcaaatgttcacttttggtggatattgccaaattgagttcccaagtggtcataccagtttacacacccaccagcactggatgagtgttattttcccacatgctcaccaacattttttttttctttgagatggagtctcgctctgtcgcccaggctggagtgcagtggtgcgatctcggctcactgcaagctccgcctcctgggttcacgccattctcctgcctcagcctcccgagtagctgggaccacaggcgcccgccgccacacccagctaatttttttgtatttttaatagagagagggtttcaccgtgttagccaggatggtctcaatctcctgacctcatgatctgcccgcctcggcctcccaaagtgctaggattacaggcgtgagccactatgcccggcttcaccaacattttctatattatcagactttaaacttttgttttattaatttttttctttttgaagacaggcctttattttaattttattttttgagacagcatgtcactttgtcacccaggctgaagtgcagtggcagcatctttgctcactgcagcctcaacctcccaggctcaagtgatcctcctgcctcagcctccctggtagctgggactacagacatgccatcatgcctgtctaattatttccttaaactattttcttttttttttttgagacggagtttcgctcttgtcacccaagctggagtgcaatggcgcgatctcggctcaccgcaaactccgcttcccgggttcaagcgattctcctgcctcagcctcccgggtagctgggattacaggtgcctgccactatgcccgtctaatttttgtatttttagtagagactgggtttcaccatgtaggccaggctggtcttgaactcctgacctcaggtgatccacctgccttggcctcccaaagtgctgggattacaggtatgagccaccacgcccagccctttaaaatattttctggagatgagatctcactgtattacccagtctggtctcaaaatcctgcgttcaagtcatccttccaccttggcctcccaaagtgctggaattattggtgtgagccacgtgccaagccagactttaatgttttttgcagggtgacacagcagttgcctcctgctgacatcccagatatgcaaatgctggggctcaggagcatcggcctaacccttcctcactttgtctgtctcagctggactatcacctcctccttcaggaaggcctccccagtctaccttagctgactggcagcttcccataacctcgcgtgctttcccatcacagcactgggaacttgaggggtgactgtctcattatggtctgtcttccccagcggactgtgagctccccaggaagaggtcacatttgcagggccattgaacaggctgaaaggaacacaaagttgctacaaatagtacttttgtggaaggctccatctacttgaagtaaggagttcctttctctaattcctacaaagtacgcccttgggatggcagtagctcacctacccaccacacctctgtgtcctcagcatctggatacagcagcaaggaagcaccacatggctggtggtgtttattcccatttgggtaccctcaactaaatgtagctctgaagagcatgagcctaggtcatgttctttccatgctttgcctagcacaaagcaagtgtacaataaccatttattatttaatgattctaaagctctgtatttcagtggtggaggatatacccaattagaggtattatagtcactgtaataataactagtgcctactgaatgctgactgccaggaacctgtgtggtttttttcttttcttttccttcttttttttttttgaaacagaatctcacccacgctggagtgcagtggcgcaatctcagttcactgcaacctccacctcctgggttcaagcaattctcctgcctcagtctcctgagtagctgggattacaagcactctccaccacacctggctaatttttgtatttttagcagagacggtttcaccatgttggccaggctggtctcaaactccagacctcaggtgatctgccctcctcggcctcccaaagtgttgggattacaggcgtgagctactgccccggccccagctttaacaaaatttttttttgtagagatagggtcttgctgtgttgcccaggctggtcttgaactcctggcctcaagtgatcctcctgccttggcttcccaaagtgctgggattacaggtgtgagccacctcacccagcccctcttttttttttttttaatacggtctccctctgttgcccaggcaggagtgcaatggcaagatcggggttcactgcggcgtcaactcctggacttaaggaatcttcccatctcaacctccccagtagctagcactacaggcatgtgccaccaggcccagctgatatttttttttaattttttttttttttttctgagacagagtctcactctgtcgcctaggctggagtgcagtggcgcgatcttgcctcactgcaagctccacctcctgggttcacgccattctcctgcctcagcctcctgagtagctgggactacaggcgcccgccaccacacctggctaattttttgtatttttagtagagagagggtttcaccgtgttagccaggatggtctcgatctcctgacctcgtgatccacccgtcacggcctcccaaagtgctgggattacagacgtgagccaccgcgccgggccttaatttttaatttttattattaatttatttatggagaggtcttgctatgttgcccacgctggtcttgaattcccggcctcaagtcatcctcccacctcagcctcttcaagtgttggtattacaggcattagccaccgcgcccagacttaaatcacataaactctttttttttgagaccaagtcttgctctgtcgcccaggctggagtgccgtggcacgatctcggtttactgtaacctccaccttcctggttcaagcgattattttgcctcagcctcctgagtagctgggactacaggcgcgaaccaccacgcctagctaatttttttttttttttttgagatggagtcttgctctgtcgcccaggctggagtgcagtggtgcaatcttggctcactgcaagctccgcctcctgggttcacgccattctcctgtctcagcctcctgagtagctgggactacaggcgcccgccaccacgcctgtctaattttttatatgtttttagtagagacggggtttcaccatgctagccaggatggtcttgatctcctgacgtcgtgatccgcccgcctcggcctcccaaagtgctgggattacaggcatgagccactgcacccggcctttttttgtattttcagtagagacagagtttcaccatgttggccaggctggtcttgaactcctgaactcaaagcctgccttggcctcccaaaatgctgggatcacaggcatgagtcaccgcacctggcctatagcttccttttaaacagcacatcgttgcttttgcatcagccagaaaaaaaaaatactttttagaagaaaacgtacattatcatgagtcatagtatttgaggagtacagctctgaagcggcctgaggtgagggtgcagctggaggcgccgccccctggtgactgggtactcagggttgggttgagccaggagggtggtggttgcctcaggctctgtgaggtgggcagggagctgggcagggagctgggcggggtcctgagacattcaacctcagctggttcctgggttccgggccctggagcagtgagggaagccagttatatgggaggcaggtgagtcaaaggagggtcaggctgggtgccagagaggagggccactgcttctgtgagggggcctctggggccttccgtccatcacccagtgggcatatggggacaccaccgaggcccagagacctcttgcccagtctccccactctcacctcagaggtccttgcagctaggggcagtggcctctgctgagctttgcccagggtgtagccagttggcctcagggcactcctgactggtggcatgagcctcccaggctgccagggtcaggtcagctcccacgcctccaccctgggcagggcccaggcctgcattcatgggtgcaagaggagagagaggcctgagccctggatgggtgtggttgtgtgtccttggggctgatgcaggattttttttttttttttgagacgatgtcttgctctgttgcccaggctgcagtgcagtggcacgatctcgtctcactgcaacctccatctcctgggttcaagcaattatcctgcctcagcctcccgagcagatggagttacaggcgtgcaccaccacgcctggctaattttcgtatttttagtagagagggagtttcaccatgtgggccaggctggtctcgaacttccgacctcatataatctgcctgccttggcctcccaaagtgccgggattacaggcgtgagccaccgcacctggcctttctgcaggattctgaattgtgtatgtgtggagagtaaggggactgtgtgctctagaagggctgtggtgggaggtctctggcctggtgcaggtgggtgttggttgggtctgtgcactgtgggagtgggtgcctgcaggaagccagtttatccttttgcaggcagtggacttctctaaggctgcgggcatgtgtgttggcatcttggagtcccaggtgttttggcgtgagtaatactgtatagatgtaagtgtgtgtagtgtttgcaatgttgtagtgtgggtgcatgtgtctgtgtgtcctgtttgttgagaggattcattgcatgtggttctgttaggagtgataatggggtgttttgagacatttcctccttggtctctattttttggtgtgttggttatgcagatttggtgtttcggtagtgtgcgcggaggtcagtgtgttggttgtatattatggtgtactgttgtgcgttgtgcatttggcaggttgtgtctattggtgtgtggctgttgggtttgtctgttgtgtcagtcgtacatataaatgccacgttgggcgtgtgggtgtgtgcatttgtatattgctctgtgggtgtgcgaagcagtgtgtttgtgtaaccctgcaggtttggcctatgctgagtaacctaagatgggagctccctgagccttggctctgcccttgcctttggctgctggagaccctgggcagcaatggccctttgtccagccacaggaaaaccccacccccctccatcggcaggggacttgggaggggcccagactggtaggctccagcctcccgtccattgttctggggcctctctggaaaacaggatgggaggtgaaaggtggacacaggcctggacccccacactccctgaaacaacccaggggcacagcacagaatccttaggagggagggcctggggacagtccccattttgtggatgagaaaactgaggggtttcattcctattaaaagggagagagcctgaagccccacaccctttatgtgcccacccacagcctcctgccgggtttgggggatggaaaaatgacaccccagaatggaaacaaaacggtctattgtggtttccatttctgaatgcttaccatgtgctaagtgcagaagtgtcataactctgcaggttaagttcatattttgtacccattttgcacaggagtacactgaaccataaggcaacaatttattcttcaaaggacactactctaaacattactgtatttcaagtagtacgctgtgtgaccttgagcaagttgcttaccttctctgggccaggccctagttcagctctgggacacagcagtgaccaaaggagccgtggttcctgctctcttagagcccatagcctgggcagggaggaggaggcaaggaatggcaaatacacaagaaaacaaagatcatttctgatggtaatgaattcagtgaataagagcaggagaatgtaaaagaaagtagcctagggggatctgagaaggcctctggggaggcgacatttgacctgagacttgaagaatgaggagtctggcaaagacctggggctgatcagtgttctaggaacaagtaacagcaagggcaagggccctgaggcaggacagagctattaatagtttaaggagggaggcctctgggctggtgagagaaagggaaggggcccagttgggtagtgggcaggggaggagtttggatcttattctccgtgagatgtgctggttctggtggtagtgggggggcctgtagtctcctgttacaagggttgggggtgtggggacagccagagccaaaggtctctcccccacagctccggcagtcccagcccagaggcgccggcctggcggctggaagattgcactgtgggcacatctggggagcagctgccgagccagggccagagtgggtcacgtggcacagggcaggaccgtcctggagcctacaaggccaagactcctaggaggggcagtggagaacactctggacgagaacagtgcgtcaacgaggaggaactgtgcactgtagacgtccaggcacacggccccctgcagccccacacagcccctgcctcaggacagagtgcctgggttcaatgccacctcccagctttgtgatctgaaacaagtcactcaacctctctgggtctcatggcctcagctgtgaaggggacatgatattactaccacagttccacaggctgttctttttttttttttttttttttttttttttttaattttttgagacgcagtctcactctgttgcccaggctggaatgcagtggcaccatctcagctcactgcaacctctgcctcccgggttcgagcgattctcctgcctcagcctccctagtagctgtagtagctgggactacaggctcccgccaccaggcctggctaattttttcatatttttagtggagatggggtttcaccatgttggccaggctggtctcaaactcttgacctcaggtgaaccacccacctcagcctcccaaagtgctcccaggctgtttatttctaattcaacaaatattcgttgagcacttcccacatgccaggtgctgcatgaggctctgcgtgacagcagggaacaggacctccgtggtcccttcccttctaagcacacaattaatgctttagaaccaggcctggcattgaggaaactcttagtaaatgtaagccatttgcctggagctctggaggccagaggaggcaccctggaaggcagagaaggaggtgtggtgacagaaaaatcctaaggaaagtgcactcccttttatcaccaggtgctgcagttggctcctggtatggctcatttcactctcacaaccaccctacgaagagggatgagcattagctccaatttatggatgaggaaactgaggcccagtttgtcaatggcacagccaggactggaggcagtgaagggctggtccctttttctctctggggctcaatattcccatctgtgaaatggggcattacaataatacagctgcaccagctccagggagcagttgtgaaatcagatgtgccaggtatgtgaaaagggcttcctgagagactatgaccatgaatgctgggttgggaatatgggggttcatttaaggagccctccgaacttcctggccaccagaagtgtcggttttcctaaggtgactcaggaaaggaggactgggaagaaaatgcacactcaattcacactaccaacaaggccagaaaaatgcccatctgacaacaagataagcaggcaatctttatttaaactccttgtcaggccttaaacatgtaaaagataaggccaggtgtggtggctcatgcctgtaaatcccagcagtttgggaggccaaagaagaaggatcacttgagtccaggagttctaaaccagcctggggcaacatagtaagaccccttctctacaaaaaaataaaaaattagccaggtgtggtggtacatgccagtagtcccagatacttgggaggctaaataggaggatcgcttgaccccaggaggtcgaggctgtggtgagccgtgattgcaccactgtactcagcctggtggacagagaaagagcctgtctccaagaagaaaaaattgcatagaactgaaaacacacacaaaaattagtgcatataaattgggtgaaaactgaatttcatgccatgcgcggtagttcatgcctgtaatcccagcaccttgggaggccaaggcgggcagatcatctgcagtcaagagttcaagaccagcctggccaacatggcaaaaccccatttctactaaaaatacaaaaaattaaccaggcgtggtggcgtgtgcctgtaatcctagctactcgacaggcaggacaattgctcgaatctgggaggcggaggtggcagtgagccgagatcgcaccactgcactccagcctgggcgacagagcactctgtctccaaaaaaaaaaaaaaaaaggccacgcgtagtagctcacgcctgtaatccggcactttgggaggccgaggcggatggatcatctaaggtcaggagttcaagacccgcctgaccaacatggtaaaaccctgtctctactaaatacaaaaaattagccaggcgtggtggcgcgtgccagtaatcccagctacttgggaggctgaggcaggagaatcgcttgaacccgggaggcaaaggttgcagtgagccaagattaatgccattgcactccagcctgggcaacaagagcgaaactccatctccaaaaaacaaaaaagaaaactgaatttcacctgaattctggttgtgatattgtactgtagttatacaacataccaactgttggagtgttagagaggatgtggaagaactggacctctcaaatactgttgataggaatataaaatgatacaaccacctttggaaaacagtttggctgggtttttttgttttgtttggaggcagggttttactctgttgcccagggtggagtgtagtggcacgatgatcttggctcattgtagcctcaacctcccaggctgaagcaatcctcctgcctcaacctcccaggctgaagcaatcctcctgcctcaacctcccaagtagctgggactacatgtgtgcaccaccacatctggctaatttttgtactttttgtaagagatggggtttcaccatcttgcccatgctggtcttgaatacctgagctcaggcattctgcctacctcggccacacaaagtgctgggattacaggcatgcactgtgcccagtgagtttggcagttcttttgtaaagttaaacaaatacggccagttgtggtggctcacgcctgtaatgccagtactttgggaggccgaggtgggcagatcacttgaggtcaggagttcaagatcagcctggccaacatggtgaaactccatctctattgaaaatacaaaacttagccagtcgtgatggtgggcgcctgtaatcccagctactccagaggctgaggtgggagaatcgcttgaacccaggaggcggaggttacagtgagccaagattgtgccactgcactccaggctggacgacagagcaagactgagtatacattcacataaacacctgtatacaagagttcatggccaggcacagtggctcacccctgtaatcccagcaccttgggaggctgaggcaggcggatcacgaggtcaggagatcgagatcgagaccatcctggctaacacggtgaaaccccatctctactaaaaatacaaaaaaaaaaaaaaaattagccgtgcgcggtggcaggcgcttgtagtcccagctactcgggaggctgaggcaggagaatggcgtgaacccaggaggcggagcttgcagtgagccgcaatctcgccactgcactccagcctggacgacagagcgagactctgtctcaaaaaaaaaaaaaagttcatagcagttttattttactaaccaaaaactacgaacaatccaaatgcccctcaccaaatgtctggataaacaaatggtggtatatccatataatggaacactacttagcaataagaaggaatgaccgccggcccggtggctcacgcctgtaatcctagcactttgggaggcagaggcgggtggatcaccacctgaggtcaggagttggagaccaccagcctggccaatgtggcaaaaccccatctctacgaaaaatacaaaaattagccaggtgtggtggcaggcccctataatcccagctactcaggaggctgatgcaggagaatcgcttgaacctggaaggcagaggttgcagtgagccaagatcgcaccactgtactccagcctgggaacagagcgagactccgtctcaaaaaataaaaagaaaaaaggccgggcacagtggctcactcctgtaatctcagcactttgggaggccgaggcaggtggatcacaaggtcaggagttcaagaccagcctggccaagatggtgaaaccctgtctctactaaaaaaaaaaatacaaaaattagctgagcatggtggcgggcacctgtaatcccagctactcgggaggctgaggcagagaattgcttgaacctgggaggcggaggttgcagtgagctgagatcatgccactgcactccagcctgggcgacttgagtgaggctctgtctcaaaaaacaaaaaagaaaaagaaagaaggccaggtgcagtggctcatgcctgtaataccagcactttgggaggccgaggtgggcagatcacgaggtcaggagatcgagaccatcctagctaacacggtgaaaccctgtctctactaaaaatacaaaaaattagccgggcgtggtggcgcgtgcctgtagtcccagctactcgggaggctgaggcaggagaatggcgtgaacccaggaggcagagcttgcagtgagctgagatcgtaccactgcactccagcctgggcgacagagcgagactgcatctcaaaaaaaaaaaaaagaagaaaagaaaaacattagccaggcgtggtggcgggcacctgtagtcccagctactcaggaggctgaggcaggagaatgtcatgaacccgggaggcggaggttgcagtgagccgagaccgtgccattgcactccagccttggggacagagcgagactgtgtctcaaaaaacaaaaaacaaaaacaaaaaaagaccgggcgcggtgactcacgcctgcaagtgtagcatttttgggaagtggaaaagggcggataacctgaggtcaggagttcgagaccagcctggctaatgtggcgaaatcccatctctactaaaaatacaaaaattagccaggtgtggtggtgggcacctgtaatcccagctactcgcgaggctgaggcaggagaattgcttgaatctgggaggtagaggttgcagtgagcggagatcgtgccattgcactctagcctgggtgacagagcgagattccgtctcaaaaaaaaaaaaaagtggatagaaggatatgcataggttttatacaaatactatgtcattttatttattttatgtatttatattttgagacagggtcttgctttgtcacccaggctggaatgccgtggtggcatcttggctcactgcaatctccacttcttgggttcatgaaattctcttgccttagcctcccaagtagctgggattacaggtgtgcaccaccacgccctgctaatttttctatttttagtagagatgaggtttcaccatgttggccagattgatctcgaactcctgacctcaggttatccacctggcttggccttacaaactgctgggattacaggcgtgagccactgcgcctggccctgaattaatttctacagcataattttctctcttatttttatttttttgaatcagaatctcactctgtcgcccaggctggagtgcagtggcttggtctcggctctctgcaacctccacctcctgggttcaaatgattctcctgcctcagcctcccaggtacttgggactacaggcgcccaccaccacacctggctaatttttgtatttttagtagagactgggttttgctatgttggccaagctggtttctctggaattcattgcagtaaacagaattgctggatcaattaattcacagttgaaggccaggcactgtggctcacgcctgtaatcccagtactttgggagtctgaggtggagagatcacaaggtcaggagtttgagaccagcctggccaacatagtgaaaccccgtctctactaaaaagacaaaaaatttagcctggtgtggtggcgggcacctgtaatcccagctacttgggaggctgaggcagaagaatcgcttgaacccaggaggcggaggttgcagtgaaccaagactgtgctattgcactccagcctgggtgacagtctgagactctatctcaaaaaaaaataaataaatagttggtgatggccaggcacggtggctcatgcctgtaatcccagcactttgggaggccaaggcgggcggatcacctgaggtcaggagtttgagaccaccctaggcaacatggcaaaaccccgtctccactaaaaatacaaaaattagatgggcgtggtggtgggtgcctgtaatcccagcctgaggcaggagaatgacttgaactcaggaggtggtggttgcagtgagctgagatcgcgccactgcactccagtctgggcaacagagcgagactctgcctcaaaaataaacaaaaataaacacttggtgatgaattaatactctaatttcctctggttgactgttgttcttccaattatttggcaattcttttgagcagcaaactattccctcccatcattaatttaggattgctaaacaaggcgtagggagtttagagagttttggtgtgtgtggtaaggggatgaggagtctggctaattaattgatgatgtctctctcttttgaagctggtctcactgattggtttggttttcctggtttcctgatgtggaggcagaaggctcctttacttttccctcatcccccgaacttctgtgggaaaacggaacctgctgataactcagtgaattaattgctgcggggtagtgcggtggagcggagcagggagggaccataatatcaccctccactggtgagcacagatttttacccctgctaatgttgtgtggctttgggtgactaatctgagcttcggtttccccacctgtggcatgtccaggactctgcagtcagactgcctgctctcagcaggaagcggttgcattacaacactgtaccctccttataataacacaactatggttatgacttaggcgtcgtgtggagcctcagtttcctttgtataaagaaaccaaagagctcctttctttagagttgtgaaaaagactacagaagttgatcaagccgggtgacagagtaagaccctgtatcattattattttattttgaaacagagtcccactctgtcgcccaggctggagtgcagtggcataatctcggctcactacaacctccgcctcctgggttccagcgagtctcctgcctcagcctcctgagtagctggggtattacaggtgcgcgccaccacacctggctaatttttcatttttagtagagacgggatttcaccatgttggtcaggctggtctcgaactcctgacctcgtgatctgcccaccacggcctcccaaagtgctgggattacaggcgtgagccactgcgcccggccccctgtatccttttttttttttttttttttgagacgagtctcactctgtcgccaggcttgagtgcagtggtgcgatctcggctcactgcaacctccgcctcccaggttcaagcaattctcctgtctcagcctcccgagtagctgggattacaggcgaacgctaccatgcccggctaatttttgtatttttagtagagatggggtttcaccatattggtcaggctggtctcgaactcctgacctcaggcaatccacccgcctcggccttccaaattgttgggattacaggcgtgagccaccgcgcagcccttcattttttaaaataagaaataaatgaaaaaagatgatcaagacaaactcttcatacagtgcccgctgtacaaagtaagaaattaataatggtcacgtttgtgattattatttaaacaccaagcagatattaaatattagggctcagagagggcatgcgacccgcctgaattcactcagctgcagagctggaaagagaactcaggcctttttccccacgctggaaggggtagctggggcggagaggtggggggagcggtgaagaaaccccaagcggcccaagctgtgggtctgggttgggagactcgcaggtgtggggcggggaggtaaggtgacccttgctcagcgaccgcgcccgcaagaaacgcattcccaggcctcccgcccggggtctgcaggtgacgggctggggggagcacgggaactagctagaccagtttgtcgtctccatggcgaccgcccgcgcggcgccagcctgacagtccgtccgggttttatgaatgggtgacgtcacaggcctggcgtctaacggtctgagccgctggttcagacgctgacacagaccggcccgggaagggaggggggagactgtagctccgcagctgccgcgccgtgggagggagaccctgctctgaggtctttgagaagaaaatttaaaaagcagccaaaaatgggaaaaaacattaaaaaatcacgaactgttgcaggttcaggaaatttttgcaaggagctgcaaattcaaggtggaatcgaatgcagcctcactccactgcgctctatctagttcacttcccagccacccagccccaaacttactagactttcccgaattaattgctcccacccgggagggatctgggtaggccctccgggtctcaggaacacgaacagcaacattatttaggaattgagaaagcccaggggagcagatgtaaaggagcgcccgctttaaatttcggtcctgatatttgtagatcagggtccgagaagcatcttccaagagggtccggaaacccaggctctctgggctatccagagccagccgcttctccgttcgggcctcaatttctctcatctgtgaaatggagctggagaagtgagaaagtgaatatgggaaaaactgattcctgaggtcttttcattataaggcaatgcctgcttagcttccttgcctccttccagaggagcccagtgcggccctcgcctctacccgctgccctgcccggtgccctgccaccgacccacccttgctgttctgaaacccgggtcgtctttccacactgcgagcaggcactagacgagcaggaggctggacctaggagcgcgggtcacgcccccatgccgcccattggctgcttttgaacgttctgagcccgcccctccgggggccgtggcgtgtttataaaagacaagctgtggctccgcactctcattccacgttcttaactgttccattttccgtatctgcttcgggcttccacctcatttttttcgctttgcccattctgtttcagccagtcgccaagaatcatgaaagtcgccagtggcagcaccgccaccgccgccgcgggccccagctgcgcgctgaaggccggcaagacagcgagcggtgcgggcgaggtggtgcgctgtctgtctgagcagagcgtggccatctcgcgctgcgccgggggcgccggggcgcgcctgcctgccctgctggacgagcagcaggtaaacgtgctgctctacgacatgaacggctgttactcacgcctcaaggagctggtgcccaccctgccccagaaccgcaaggtgagcaaggtggagattctccagcacgtcatcgactacatcagggaccttcagttggagctgaactcggaatccgaagttggaacccccgggggccgagggctgccggtccgggctccgctcagcaccctcaacggcgagatcagcgccctgacggccgaggtgagatccagatccgaccactagatcatccttataccgacggggaaacggaggccagagagggcgtgggcgcttgcaccacttccgtcccatccttgcgggtacctggctatgcgggggtgcctaaggagcctggaaaaagcgctcccccgtcgtgcttcctggggaagggggcgttcgctgcgctcggagcggcgtcccttccaacccgccggtctcatttcttctcgttttcacaggcggcatgcgttcctgcggacgatcgcatcttgtgtcgctgaagcgcctcccccagggaccggcggaccccagccatccagggggcaagaggaattacgtgctctgtgggtctcccccaacgcgcctcgccggatctgagggagaacaagaccgatcggcggccactgcgcccttaactgcatccagcctggggctgaggctgaggcactggcgaggagagggcgctcctctctgcacacctactagtcaccagagactttagggggtgggattccactcgtgtgtttctattttttgaaaagcagacattttaaaaaatggtcacgtttggtgcttctcagatttctgaggaaattgctttgtattgtatattacaatgatcaccgactgaaaatattgttttacaatagttctgtggggctgtttttttgttattaaacaaataatttagatggtggtaaagttgtagtgacttcttgggttgaggggaggggcctgggctgggggttgacccctgaccctcttcacagctggttctgggaggagaattggagggctacatctggattgttgctcttaccggcctgaatgagtgtttccggtgtctttaaagtctattcttcccccaccatccctgcccatttccctgctccccagtgttataaaactaaatactccagacctctggggtttctcacagtgatcattgggccatctagatcacctggggaggttgttaaaatgcagatgaacctgccagggccccctctgtattgggagtattgagcaagccatttaagttggagaacctggccgctggaccacccacttccttgccaagatgtggataaagtgagacccagtggaaagggacttgcttagggccatagcttgtgagaggcagtgattctatcaccccattccccagttggaggtgcctcccccaacagcctacctctgggttccagcaggcagccctggggctcctggctcatccaagtgggtgagcaagttggcagggccaggctgggcacagctgccgagacacctgctctgggtccagactcggcctcctcactctggcctggctctgtcggcagttcaaacaaatctcccccaccaaccccggggctcctgcgtaggatctgaggagtggacgagtctcattacccagctcctgagcaggaaaaatatgtcattggcaagggtctaagaatcttcctggacatgtatgtggatttctactcaggggagcatgtatgagtgtctacgcctgtgtatgtaacaggagtaagctgatcttcccccactactcccacagtggggatgggccaactgttcacatataggcttgggggagggggtgtaagtaggagtatgcttgggggtgtgtgcagaagggcaaatgagagcacatgtgttctgcagataagtgtggaacctccagctgtttgggcttgtgtgttctgcctaaatgcattgtaggcatctctgcatgggtctggcatgatggatgggtttgtgtgtctgggggccacagaaccacactgtgggtttctgtgtgtataactgttctatagattggttggcattcctgggcctctgcgggtctggagtgaaggtggggacagctgtgtttgggcaaacccttcctcaaaagttcacgtggcaactccctgggctatcgttaggtcctgggggcaccaaccctcaaggattgctgccaggtaaacccccctgtattacatatggagaaactgagtcccaggaatgacaaagaacttgtcccagacaggtaagggctattaatatattttgtcaataaacaatagaataaaatcaatagcccttagcaccagaagcctggctctgctcaactgaaccctttacaaaaacgatttcatggatccctgtggggctaaaggcaagactgtgatcccagttttacagcagaaggaacaagctcagagaggggatgaacaaaaaatcaaatgaaagattatgatttgagcactaacattaagccaggtacaccccctccacagtttatggattttatcgaagaacccagtacttgcaggcgaattatgttctttgctacctcctccccaccggctgctgtattacagtactaacctcacggaatgtagtacagaataaatgaaataaagtaagtgtgtaaaacgtttagcacagtgcttggcacagaatgtttcatagttataaattattattgtcgcctgtgagtccttggagtgtcctcggaggcacacgtgtgcacgcacgcactctcacgtgtgggcccccgcctgcaagcccacccacggggtctgagcgggttccccctcgcgtactccgacatgcagggcctttttccaggggaggaaggggctgcggcgggggcctgggccacctcccccgccattcaggcacactctggattccacgtttccctctgttcccctttggcccagacccagcccatctggaggccggctccgcggcggcctgggagcgtttccatcagctgggcccgaggaatgcggagctatttaacctgagcatccccaggtgtacggaggcgcctggctgtctggggcccgcagcctttggcacagccgcgctagacaaacagcgcgccgcccccgccctgcccctccgcccccagctgcagccgggcctgggaaccggcgggcgccggcggcttgcataagaggctccgggcctcgcagagggaggggggacagaggccaccggtgtgtgtgcatgtaacacacaaaaccctgctcctttggaaatcattaactccttaacccctcctggacaggacgaagccaggagctggggtggaagatgccgagaaacccgaggaccaagtttcttgggcactggactctgcctttccggggctgtactgttaattttatttaagaaatacagagagcttattgtgtgctgggcaccatgctaaactctttacaatatcaattcatttaatcgtcagaacttgttaacgaggccagtgctatcatcatatgctcattttaataagagcaaccaccaccactacaacaagagtaataggctaacattttagtagggaggcaggtagaacacaagcccagaatcaaccttgatgctcatcacttcacctgtcagagcctcttcttttttggaaaacgggcttcagaacctgggcttcaaggattaattgaaccaatgcacctaaaaagcatagcacaggctcatggtagatacttagtgcatattgcaataaagtgttttgagcggattgtctcaacagccctaccaggtgtgggcctactggtatattcacttttttggtttttttgagacagagtctccctctattgcccaggctggggtgcggtggcaccatcttggctcactgcaacctccacctcccaggttcaagtgatcctcctgcctcagcctcccgagtagctgggattacaggcacgtgccaccatgcccagctaatttttgtattttttttgtagaaaagggttttcaccatgttggccaggctagtctcgaactcttgacctgaagggatctgcccacctcagcttcccgaagagctgggattacagatgtaagccaccgtgcccggcctgtgttcacttttcagatgagaaaacggaggcatcaaagaggtgaggtgacccacccaaggccacattgcacattaccttagaggactttccagaaatcagacttgtctaaatcaggtttatgaggggcctcatgttcccacagtatgtccagtttataaagcctttcatcttatttccaactgaaatcatacctggtcattatatttatttgttttaaaagcataactcagataaatgcaagaaatatacacatatcacaatttttgcaacccatattggggaatgtctatttttttttttaagacagttttcctcgtcacccaggctggagtgcaatggggcgatctcgactcaaccgcaacctccgcttcccagtttcaagcaattcttctgcctcagcttcccaagaagctgggattacaggcatatgccaacacgcccagctaatttttgtatttttagtagagacagggtttcaccatgtttgccaggctgctctcgaactcctgacctcaggtgatctaccctcctcagcctcccaaagtgcatgaggccaccgtgcccggctctttttttttttttttttttttttttgagacagagtctcgctctgtcgcccaggctggagtgcagtggcgtgatcttggctcattgcaacctccgcctcccgggttcaagcaattctcatgcctcagcctcctgagtagctgagattacagacgcgcaccaccacatctggctaatttttatatatttagtagagacggggtttcaccatgttgcccaggctggcctcgaactcctgacctcaggtgatcagccctcctcaacctcccaaagtgctgggattacaggcgtgagccaccacacccgacccatgccagtcactcttattgagcaccaggaactgccagccagagagagctccctgctgcccagtgtcacacacagcagggcttcctggtggcaggcaggtctcacatcctagcatggctgccggaaagaaaggaggtgagtcacagggccaggccaggagctgggcgaggctggggccagggtccaggcaggcgccactttccaggaaagggaagggaagaggaaaccagaaggccaggaggagcacagggaggggcgagggtgcccttatctccctggacctgccctggctggtgctgcttcctgctgcaactcttgcaaaacctcgttcccaacgctgtcctcaagcagggtgccccaggccagtacagggttgcatcaaggccttgtgcaaggggggttaaagggaggacagtggctgggagcaaaggcagggcaagaggcaaggcaaatgcgggttctaggcccagtgccacttctggttgggcacctgcttcacctcctgggctcttaggatccccagcatttttttttttttttttgagacggagtctcactctgttgccaacctctgcctcctgggttcaagcaattctcctgcctcagcccctccagtagctgagtctaccggtgtgcaccacgacgcccagcaatttttgtatttttagtagagacagggtttctacatgttggccaggttggtctcgaactactgacctcaggtgatccacctgccttggcctcccaaattgttgggattacaggtgtgagccactgcaccctgccatccccagcattttttttttttttttttttttgagacagagtctccctctcttgctagcctggagtgcagtggcaggagctcagctcactgcaacctgtgtctcccaggttcaagtgattctcctgcctcaccctcccaagtagctggggttataggcacgtgccaccacgcccagctaatttttgtgtttttagtagagacggggtttcaccgtgttggccaggttggtcttgaccttctgacctcgtggtctgcccgccttggcctcccaaagtgctgggattacaggtgtgagccaccatgtcgcccagcctcattcccagcttttaaatgggtgttatactcaccgttttgaggtttcagtgatatcatcccaaacctttgcactcctcaagcctcaggctaggccattgtacttctacctgtgaaactagccccaactggttctttcaacaaatagtttataaagcttctacaatatactaggaaccgggccccaggagttaacaattcagatacaaattcttgcagtcttggaacttacattcttagtgggagacacgcagtagataaatatgcagatgtgtaatcagaggtgcatttacctggaaattacttaagcttaaacttcaagcctcctcacatggaaagagtatcagccatgtgttagcatgatttctgtgtgttttgcaagatttgcaaaatgttgtattcttttccttagaggctgcacaaacctagatcctcttctttatatatagacgagaccgagcagggcccaagcttgaaggcatagctgcagaagacaaagaatcgtgtctgtgggtgctgttcgttgcttgggtttgttttgttattttattaatttatttttatttatttatatattttttgagacagtttcctccttgtcacccaggctggagtgcaatggtaccatctcaactcactgcaacccccgcctcctgggttcaagcgattttcctgcctcagcctcccaagtagctggggttacaggtgcctgccaccacgcccagctaattttttttttttttttaattgtgagacaaagtctcgttctgtcaccaggctagagtgcagtggcgcaatctcgactcattgcaacctctgccttctgggttcaagcgattcttctgcctcagcctcccgagtagctgggactatggcgtgcaccaccacgtccagctaattttttgtatttttagtagagacgggatttcatcatgttggccaggatggtctccaacgcctgacctcaggtgatccatccgcctcggcctcccaaagtgctgagattacaggcgtgaaccaccgggcccggcctgttgttgttttaatagagacggggtcttgcatggttgcccaggctggcctcaaaatcctgggctcaagcaatcctcccgcctctgcctcccaaagcactgggattacaggcgtgagccaccctgtccggcccggtttttgggtttgagaccctaaaatctctgggcggcagagaagagctgggaagcgggccagcgctttccagagcacctggtctcatgcagctgcaaacgcaggcgctgtgcccgcccccgtcttcctttggccaccagcgccccctcccgggcagagcccgggctatgccaccgtgggcgagaaaggcggcctggttgcggcgagaggcggaggctgatgccttggtggcctctagtggacgccttgggaactgcagtcagagctgcaagcgtgttaggagagtgaagagttctgcgcacatgtaaaccctcagccccttctctcaggccccctttggctaccgtttcccccattctctcatcctctttcctcttccttgcttgtgacaaccccctatgagcctcattccctccctttttttttttttttttctgagatggagtctcgctctgtcgcccaggctggagtgcagtggcacgatctcggctcactgcaaccttcgcctccagggttcacgccattctcctgcctcggcctccggagtagctgggactacaggcgcccgccaccacgcccagctaattttttgtatttttagtagagagggggtttcaccgtgttagccagaatggtctcgatctcctgacctcgtgatgcgcccgcctcagcctcccaaagtgctgggattacaggcgtgagccagcgtgcccggcattccttcccttttaaaggaggagatcttgggctaatcttggaaatttcttttctttttctttttcttttctttcttctttcttttcttttctttttttttttctttgagacggagtctggctctgtcgcccaggctggagtgcagtggctcgatctcggctcactgcaagctccgcctcccgggttcacgccattctcctgactcagcctccccaatagctgggactacaggcgcccgccaccgcacccggctaatttttttgtatttttagtagagacggggtttcaccgtggtctcgatctcctgacctcgtgatccgcttgcctcggcctcccaaaatgctgggattacaggcgtgagccaccgctcccggcttttttttttttttttttttttttgtagcccaggctggagtgcagtggcgcgatcttggctcattgcaaactcatctcctgggttcaagcgattctcctgcctcagcctcccgagtagctaggattacaggcgccagccaccacgcctggctaattttgtatttttggtagagacgggtttctccatgttgatcaggctggtctcgaacttccgacctcaggtgataagcctgcctcagcctctcaaagtgctgggattacaggcgtgagccacggcgctcaagctaattttgttttttgtttttgtttttgttttttgttttttgtttttgaggcagagtttcactctttcgcccaggctagagtgcagtggcgcaatctgggctcgccaccaagcctggctcattttttgtatttttagtagagatggggtttcaccatgtggaccaggctggtcttgaactcctgacctcaggtgatctgcctacctcggcctcccagagtgctgggattacaggtgtgagccatcacgcctggcctaatcttggaaatttctttttttcaattgtgaaatgtatcacacctacaatagagcagatatcacacgtctgcagtttaaagataataataaaaccggccaggtgcggtggctcacgcctttaatcccagcactttgggaggccgagattgcgccactgcactccagcttgggcaacaaagactctgtctcaaaaaaaaaaaaaaatgtgtgtgtgtgtgtgtgtgtgtatatgtgtgtatatatatgtgtgtgtatatatatgtatatatgtatgtgtatgtatatatgtatatatgtatatacatatgtatacatgtgtatatatgtatatatgtatatacatatgtatacatgtgtatatatgtatatacacatgtatacatgtgtatatatgtatatatacacacatatatgtatatacacacatatgtatatatacacatatatgtatatatataaaactataaaacacacaagtaccagcctctctgcttgaaatagaatattagttcatttgaagcctgtgtttgcccttcaggataaaatccccataagattttacctcttatccagaactttgtgttaatcaattgcttgttcttttattttttttcacatatgtacaagtatgcatccttaaacaatccattacttgatattacctggttttgccttttatataaataaaatcatattatatgcaattttctgcaacctgattttctcatgcaacatgaattacatgagagtcatccatgttgatttcttgccttcattcattcatttccaccactttgtagtattcttttttttttttttgagatggagttttgctcatgttgcccaacctggagtgcaatggcacgatctcagcttaccgcaacctctgcctcctgggttcaagcgattctcctgcctcagcctcccgagtagctgggattacaggcatgcgccaccatgcccagctaattttgtatttttagtagagacggggtttctccattttggtcaggctggtctcgaactcccgacctcaggtgatccgccaccttggcctcccaatgtgcagagattacaggcgtgagccaccgcacccagcccactttgtagtattctattatatgatttattgccccagtctcctgtgatggacctttggattgtttcataggttttgctgttatcagcagtgctgctctgaatgccctcagtgaatatgcgttaaaaggagtaggatggctgcatcctaggtgatgcacaatttaaacattactaggttggactggagtctattttgattaaacagaataatcagaactggaaggtcccttacatacagcttaacccagcgcactcattgtagagataggaaaaggaaagcccggagaagttcagtgacttgcccaggatccctcagacctggcctcttgggctaaggtcatagccttggaagtgattctgggagtgaggcatgagaatatatttccttctcattttgaagatgaacaagactgtattttacccttaaaatagtcttctaggctggttttagaatctgggcagctgggcacggtgggctcacacctgtcatctcagcactttgagaggctgaggtgggcggatcacgaggtcaggagtttgagaccagcctgaccaacatggtgacaccttgtctctactaaaaacacaaaaattagccgggcatggtggtgcacgcctgtaatcccagctactcaggaggctgagacaggagaattgcttgaacccaggaggcggaagttgcagtgagccaagatctggccactgcactccagcctgagcaacagagcaaggctccgtctcaaaaaataataataataatctgggcaaactagaaacacaggatgctccttgaaaaccatcccgccgggcgtggtggctcacacctgtaatcccagcactttaggagaccgaggtgggtggatcacgaggtcaggagattgagatcatcctggctgacattgtgaaaccccatttctactaaaaatacaaaaattagccaggcgtggtggcatgcaactgtagtcccagctacttgagaggctgaggcaggagaattgcttgaacctgggaggcagaggctgcagtaagctgagattgcaccactgcactccagcctgggtgacagagcgagactccatctcaaaaaaaaaaaaaaaagaaaaaaccatcccaagacaaatacacattcacactcactgcatctccaagtcctgccaactctaatgcttttttttccaccccctcaaagacaaagtctcactctgtggcgcaggctggagtgcagtggtgcagtcttgattcactgcaacatctgtctcctgggctcaagcgatcctcccacctcagcctcccaagtagctgagactacaggtgtgcaccaccacacctggctaatttttgtattttttgtttcatcatgctacccaggctggtctcaaactcctgggctcaattgacccacctgcctcggcctcccaaaatgctgggattacagacgtcagccagtgcgcctggtcttaccgccttttttttttttgagatggtgtcttgctctgtcgcccaggctgtagtgcagtggcaggatctcggcccactgcaacctctgcctcccaggttcaggcaattctactgcttcagcctcctgagtagctgggattacaggcatgtgccaccacgctcggctaatttttgtatttttagtggagatggggtttcaccatgttgtccaggctggtctcgaactccttgacctcaggtgatctacctgcctcagcctcacaaagtgttgggattagaggcatgagccaccatgcccggccttaactcttaaatatatcccaaatttacgcatttctgcccttccccttggccattaccctggtgcccatcatctcactgggatactgcaatagcctcctcagtcaccctgcttccatttccccctcattctccacatgacagccagagagatccttctaaaaaatacaaggatcacgtcacttgcttgcttaaatgctccctgtggcattcgttacttttggaataaaatcctaatttgttaccatagcctacaaggcacagtaaggcctggttcctgcctacatccacccacttcccctaactctccccttgccactcccctccagtcactttggtttcctttcagttgctctttcataactggggagactttgcctgtgcctcaaattctacaccctgcgtatcttcatgtccttcagctttcagcccaaaggttggctcagagggtcttccccgaccatcccatctccttctttttttttttttttttttttttttgagacagggtcctcactctgtaggctggagtactgtggggcaatcatgactcacttcagccttgaactcttggactgaagtgatcctctcgcctcagcctcccatgtagctgggaccacaggtgtgtgccatcacgcctggctaattttttttcttttcatttttgtagagatggggtcacactttgttgtccaggctagtctcaaattcctgggatcaagcagtccttccaagtagggcttctcagagtgctcaagtgatcctcccacctcagcctcccaagtagctgggactacaggtgcacgccaccatgcccagctaatttttgtattttttgtttcaccatgttgcccaggctggtctcaaactcctgggctcaattgatccacctggctcagcctcccaaagtgctgggattacagcaccatttcgctgtaatctactggttcaagcagtcacagaagccctctcaggttcaaaagggaggagacatacaccccccttttgacaggaagaatgtcaaaaatttgaggccattaagaaataaaatggccaggtgcagtggctcacgcctgtaatcccagcactttgggaggccaaggcaggcggatcacctaaggtcgggagtttgagaccagcctgaccaacatggagaagccgcgtctctactaaaaaaaatacaaaaatattagccggacatggtggcacatgcctgtaatcccagctcctctggaggctgaggcaggagaatcgcttgaacccgggaggcggaggtttcggtgagccaagatggcgccattgcactccagcctgggcaacaggagcgaaactttgtctcaaaaagaaaaaaaacaaaaaacaaaaaacaaagaaagaaaagaaaagaaactaagccggggtgccagggtgcatctgtagtcccagctactttggaggctgaggggacaggaccacctgagcctgagcccaggagtgggtaacataatgagaccctgtctctaattataaaacaaacaaacaaacaaaaactgtcatgaggataataagctattctaagtgcagtgtgttcagagaggttcagttccttgcccagaggacaattacagatgtgaatagtgataaagaaggaaacaacaaaaaacaggttgaaaggagatgggggccgggtgtgatggctcatgcctttaatagcagcactttgggaggccgaggtgggtggatcacctgaggtcaggagttggagaccagcctggccaacatggtgaaaccccatctctactaaaaatacaaaaaaacttagccggctgggcgcgtggctcacacctgtaaaaatacaaaaaacttagccgggaatggtggcaaacatctgtaatcccagctactcaggaggctgaggcaggagaatctcttgaacccgggagggggaggttgcagtgagccaagatcgtgccactgcactccagcctgggtgacaagagcaaaactctgtctccaaaaaaaaaaaaaaaattagccaggcatggtggtgcatgcctgtaatcccagctaattgggaggctgaggtaggagaattgcttgaacctgggaaggtggaggttgcagtgaactgagatcatgccactgcactccatcttgggctacagagtgagactctgactcaaaaaaataaaaacaaaaacagggaacagaagaattattcaactatgctccactttaatccctgacccacagaatctgtgagatatagtaaaacggttgtcgttttaagccactaaattttggggtaatttgttatggagcatttgttatggtaatttgttgtagccagaaccatcatgtttatttgattgcttaccatgttttctgtctctggaatgggtgctccatgaactgctctgttctctgccatgtgctcactgtccagcccagagcctggcacatagttggtgcttaataaatatttgctgaataaatgagagagtggattaatagatgtatgcccaccacactcgggttcaactccgttcatccatctgggtagagtttctgggataatcctgcatatgccttgacattgggaagaggggcactcaggcacctgccatcccctggcagcctcgtccccagccctggaagggggtactgagagtggctttggtcaccaaaacctattgttgcatgagggctcagttagtgcctacctgccatgacctcccttttctgttccaacctccagactttgcataaatgacttccagtgatgtcttccaagtctcatttttctgaattcacctcctccagaaagctggtctagtttggaaactctctcaggctcccttcctgacctccagagacaaccctcctccctcttgttgactacagacaattgcagggattgcttcaggatcattcccacccagagccccctggtgccccacatggccacctcccaccctgcacaattcagtcccctagcaatgacattcccaaaccaaaatccctgctatgtgtcaaatcctgtgctgggtgttttgctgtcagtatctcggttcaacacacctccacaactcagtgaggtcagatccatgattgtcccattttatgaatgagaaaggtgaggctccaagaggaaaaactagttccaggtacctggctggcaagtgctcttctaggatccagttcatcatcatcatcgtcatcatcatcatgactataacttactaagcactgacagtgaagataacgatctaccaaaggatgcccaattcaaggggttaaacttcaagcagaaaaaggatattttcttagtttcaaagtatctccctaagtatatttaataactacacagagtaaaataattttttttttttgagatggagtctcactttatcacccaggatggagtgcagtggtgcaatctcagctcaccacaacctccacctcccgggttcaagcaattctcctgcttcagcctccccagtagctgggattaaaggtgcacaccaccacgcccagctaattttgtatttttagtagagacggggtttcaccatgttggccaggctggtcttgaactcctgaccttgtgatccacccgcctcggcctcccaaagtactgggattacaggcctgagccatcgcacccggcctaaaataataattttacagtggagaagtccagtacatactgccctagataactgatcaaggttaacattggtggtcatacatgtcaacatcagggcctctgcaaggatgcactgagaaaggcatgacaccacttctgtgacattttccccataattcatgacttcaatttgatcacaagaaaatctcagacaaatccaacttgaaagacattctaccaagcagctgaataggactcttcaaaagtgtcaaggtcacaaaaaagaaggaaagaccgaggaactgtcacagattgaaaaagactgctggtgccgggtgtggtggctcacacctgtaatcccagcactttgagagcctgagcaggaggattgcttgagctcaggagtttgagaacagtctgggcaacatggtgaaaccctgtctctacaaaaaaaatacaagaaattagctgggtgtggtgggctcactcctgtagtccgggctactcagaaggctgaggtgggaggatcgctggagcctggggggcggaggttgcaatgagctgagatcatgccactacactcctgcctggggcatagagtgagactctgtctgaaaagaaaaaacaagaaaagaaaaatctggtttaggccgggcggggtggctcacgcttgtgatcccagcactttgggaggccaaggcgggcagatcgtgagatcaggagatccagaccatcctggctaacatggtgaaaccctgtctctacttaaaaaaaaaaaaaaaaaaaaaaaaaaattagccaggcatggtggcgggagcctgtagtcccagctacttgggaggtgaggcaggagaatggcttgaacctgggaggtggagcttgcagtgagccaagattgcaccactgcactccatcctgggcaacagtgcaagactccgtctaaaaaaaacaaaagaaagaaaaaaaaagatcctggtttggatcccagaacagaaaaaggacataagtaggaaaacagatgaaatcgaaaaacttctgtactttagttcatagtaatgtaccaaggttaatttcttagttttgataaatgttctgtcactgtttgagatgttgacagaaggggaagccaggtgaagggtatacaggaactccctgtactatttttacatcttctgtaagactaaaattatctcaaaaggaaaaaagacattaaaataaaagagaaaggctgggtgtggtggctcacgcctgtaatcccagcacttttcgaggccaaagcatgaggattgcttgatcccaggagttcaagaccagcctgggcaacatagtgaggtcttgtctcaaaaaaaagtaaaaaaattagccgagcatggtgacacaagcctgtactcccaggtattgggaggctaaagtggaaggatcgtttgagcccaggaggttgaggctacagtgaaccatgatcacacaccactgcactccagctgagaccctgttccccgcccccccaaaaaaaagagcgagagagagaatgaaggctaaagtggagtaagactaccatagccctctctcccactgattacaacaaaaaactctggacagcctgggcacggtggctcacgcctgtaatcccagcactttgggaggccaaggaaggtggatcactagaggtcaggagttcgagaccagcctggtcaacatggcgaaacactgtctctactaaaaatacaaaaattagctgggcatggtggcgggcacctgtaatcccagctacttgggaggctgaagcagaagaatcacttgaacccaggaggcagagggtgcagtgagccaagttcgtgccactgcactccagcctaggctgcagagcgagcctccgtctaaaaaagaaaaaagaaaacaaaaaacaaaaatcaaactctggacaaatacagaaagcacctacttaaggaggacctctgaaaagtaaacaatagaaaatagattggcataggaagtcaacatttgaagaacagccagcatggcagtggaaagtttcctggtgaattttctttctgtattttctggccttgacccaaaggactctgaatcaggaaactgtgtttgacaccagcagcaaaaaccttcaaaagaaaagtttaatattctggccagagaaccaggaaaacacgcccctgttagccagacagtgtgaggagaattttgagtattttgttgttgttgttgtttaaattattatgaatattattattattgagacagggtctgactctgtcacctaagctggagtgcagtggtgcagtaacagctcactgcagcctccacctccctggttcaagcaatccttccacctcagcctcccaagtagctgggactacaggtgtgtgccaccatgcctggctaattttttttgtatttttctttttttgagatgcagtctcgctctgtcacccaggctggagtgcagtggagtgatctcggctcgctgcaagcttcgcctcctaggttcatgccattctcctgcctcggcctcccgagtagctgggactacaggtgcccgccaccacgcccggttaatttttttgtatttttagtagagatggggtttcaccgtgttagccaggatggtctcgatctcctgacctcgtgatccacccgcctcggcctcccaaagtgctggaattacaagcatgagccaccacacttggccttttttttttttttgtatttttcatagagacaaggtttcatcatgctgcccaggctgatctcaaactcctaggctcaagcgatcctcccacttcagcctcccaaggtgctgagatgatgggtgcaagccactgtgctgggtccttcacaggcttttaacaggacccagagtctcacaagacaatattttatttatttatttattatttattactttttttgagacagagtttcactcttgttgctcaggttggacaggttggagtgcaatggcacgatctcaactcattgcaacctccgcctcccaggttgaagccattctcctgcctcagcctctggagtagctgagattacaggctgccaccatcacacccggctcattttttgtgtttttagtagagatggggtttcaccatgctggccaggctggtcttgactcctgacctcaggtgatccacccgccttggcctcccaaattgctgtgattacaggcatgaaccaccacacctggccacaagacaatattttattttatttatttatttttatttatttttttttttgagacggagttttgctgttgttgcccagtctggagtgcaatggcgcaatcttggctcaccacaacctcggcctcccaggttcaagcgattctcctgcctcagcctcctgagtagctggaattacaggcatgcaccaccacgcccggctaattttgtatttttagtagagacggggtttctccatgttggtcaggctggtctcaaactcccaaccccaggtgatctgccctcggccttccgaagtgctgggattacagaagtgagccaccgcgcccggccaccagacaatattttaaatgcccaggatacaacacaaagttactcaacaaggaaaatctcaccaaatctcaaagaaaaaaacaatcaatagatgccagcacacacacacacacacacacacacacacacacacacacacacacccagccattagaattgacatacaaggccaggcatggtggtttacgcctgtaatccctgcactctgtgaggctgaggtgggaggatcctttgaacccaggagttcaagaccaacctgggtaatacaggagaccctgtctctgcaaaatttttttttttttttgagacagagtcttgctctgtcgcctagactggagtgcagtggggcaatcttggctaactgcaagctccactcccgggttcacgccattctcctgcctcagcctcccgagtagctgggactacaggcgcccaccaccacacctagctaattttttttgtattttagtagagacggggtttcaccatgttagccaggatggtctcgatctcctgacctcgtgatctgcacgcctcggcctcctaaagtgctgggattacaggggtgagctgccatgccaggccaaaatattttttttaataaaataaaaattttttaaaagttgaaatgattatattgataacaagtagatttagaacaagaaaaaaattatcagagaaaaaaggacattatatgatgattaaagggttaattcatcaagaagacatgacaattctgaatgtgtacgcgcttataaagttcctaaatatataatgcaaaaatgatctaaaaagggaaataaagtcaccattatacttgcggatatcaactctcttctttcagtaaatgataaaacagaaaatcagcaaggactgggcacggtggctcatgtctgtaatcccagcactttggaaggctgcagtgggcagatcacctgaagtcagtagtttgagaccaggctggccaacctggtgagacgctgtctctactaaaaatacaaaaaattagccgggaatggtggtgcatgcctgtaatcccagatcccagctactcgggagtctgaggcaggagaatgacttgaacccgggaggtggaggttgcggtgagccgagattgtgccattgcactccagcctgggcaaaaagagcaaaactccatctcaaaaaaaaaaaaagaaaaaaagaaagaaaaatcagcaaggacataaaagagctgaacaacactatcaaccaatttaatcaaattgttttttgtttgtttgtttgcttttgagaccaagtctccctctgttgcccaggctggagtgcagtggtgcgatcttggttcactgcgacctccacctcccaggtgcaagtgattctcctgcctgtgccaccacgcctggctaatttttgtatttttaaacttttgtttgtttgtttgtttttgtttttgagatggagtctcgttctgttacccaggctggagagcagtggcaagatctcagctcactgcaatctctgcctcctgggttcaagcgatgctcctgcctcagcctccccagtagctgggattacaggcaccagccaccgcgcccagataatgtttgtatttttattagagacagggtttcaccatgttggccaggctggtctcgaactcctgatctcaggtgatccacctgcctcggcctcccaaagtgctgggattacaggcgtgagccaccacacgtggctgatttcttgatttctagtgtaattccattatgatcagagaatgtatcacctacatttttaaacattttttaaatataaaggcccagaatatggtctatcttggtgaatgttccaagtgtacttgaaaataatgttttgtctctactaaaatgcaaaagttagctgggcgtggtgcagggtgcctgtaaccccagccactggggcggctgaggctcaagaatcacttgaaccagggaggtggaggttgcagtgagccatgatagcaccacttcactccagcctgggtgatagagggagaccctatctcaaattaaaaaaaaaaaaagaactgaaaaatatctggaaaacccctaaatatttggaaatgaagcaacacgcttctaaataaatcatgggccagagaagaagtctcaagagaaattagaaaatatatacatgtgtagttttgtctgtgtgcatgtgtgacgtagtctcgctctttcacccagggtggaatgaagtggtgtgatcttggctcactacaacctccgcccctggtttcaagagcttctcctgcctcagcctcctgagtagcagggattacaggcgcttgccactgcacccagctaatttttgtatttttagtagagacggggttttaccatgttggccaggctgatctcgaactcctgacctcaggtgattcgcctgtcttggcctcccaaagtgccaggattacaggcgtgagccactgtgcctggccagaaaatattttaaactgacttaatgaaataaaattacaacatattaaacttcataaaatagagcagagagaactttctactttttttttttgagaccgagtctcacactatcacccgggctggagtgcaatggcacaatctccgctcactgcaacctccacctcccaggttcacactattctcctgcctcagcctcctgagtagctgggattacaggcaactgccaccacacccggctaattcctttttttttttttttttttttttgagatggagtgtcgctctgtctctcaggctggaggctggagtgcagtggcacgatttcggctcactgcaagctccgcctcccgggttcccgccattctcctgcctcagcctcccgagtagctgggactacaggctcccgccactgtgcctggctaaattttttaaatattttttagtagagacggggtttcaccgtgttagccaggatggtctcgatctcctgacctcatgatccacccacctcggcctcccaaagtgctgggattacaggcgtgagccaccacgcccggcctgtacctggctaatttttcgtatttttagtagaaatggggtttcactatgttggccagactggcctcgaactcctgaccttgtgatccgcctttctcggccccgcaaagtgttgggattacaggcgtgagccaccgtgcccagcctcaaattttctggtattaaatgggtatatgagaatagaagagtcttaaatcaatagtacaaacttccactttcagaaactagaaaaataacagccaattaaacccaaagcaagtagacagaaaacataataaacaccagaagtcaatgctattggatatagaaaaacaatagagagaaaataaatgaaacaaaagcttgttctttgaaaagatcaatatgcatattagtggtctccttcaaaaaaggggaaatctggacacagaagtagacatagagggaagatggcgtaaagagacaagagaggacagccatccatagtccaaggagagaggccaggaacacatcctccctcacagcccttaaaaggaaccaatccagggatctagaactagaaataccatttgacccagccatcccattactgggtatatacccaaaggactataaatcatgctgctataaagacacatgcacacgtatgtttattgtggcactactcacgatagcaaagacttggaaccaacccaaatgtccaacaatgatacactggattaagaaaatgtggtacatatacaccatggaatactatgcagccataaaaaatgatgagttcatgtcctttgtagggacatggatgaagctggaaaccatcattctgagcaaactatcacaaggacaaaaaaccaagcactgcatgttctcactcataggtgggaactgaacaatgagaacacttggacacaagaaggggaacatcacacaccagggcctgttgtggggttgggggaggggggagggatagcattaggagatatacctaatgtaaatgacgagttaattgggtgcagcacaccaacatggcacatgtatgcatatgtaacaaacctgcacgttgtgcacatgtaccctaaaactacaagtataataataaaaaaaatatatatatataaaaggaaccaatcctaccaactccttgattttgtacttccagcctccagaattgtgagataatacatttctgtcagccagtctctagtactttcttacagcagtcctagcaaactaatacaactaataaatgaatttagcagggttgtaaaatataaggtcaatatacaaaaatcaattgcatttctttttttctttttgagatggagtcttctttgtcgtccaggctaaagtgcagtggcgccatcttggctcactgcaacctctgcctcccaggttcaagtgattctcaagtctcagcctcacaagtagctgggactatagtcatgcaccaccacgcccagttaatttttgtatctttagtaaagatggggttttgccatgttggccaggctggtctcgaactcctgacctcaagtgaactgcctacctcagcctcccaaagtgctggaattataggagtgatccactgtgtccagccgcatttctatataatatcaatgaacaattggaaattgatttttttttttattttttagagacagggtcttgctatattatccaggctgggctcaaactcctgggttcaagcaatcctcccacctcagcctcctgagtagttacaggcacgcactaccacgcttggcttgaaatttttcaaaagtatgatttacaattgcaccaataggccgagtgcggtggctcatgcctgtaatcctagcacttttggaggctgaggcgggtggatcacctgaggtcagaagttcaagaccagcctggccaacatggagaaacactgtctctactaaaaatacaaaaaagaaaaaaaaaaaaaaattaggcagatgtggtggcatgtgcctgtaatcccaaatacttgggaggctgaggcaggagaatcacttgaacccaggaggcagaggttgcagtgaaccgagatcacaccactttactccagcctgggcaaaacagtgaaactctgtctcaaaaaaacaaaacaaaacaaaaacaaagcaattgcaccaataaaaattaagtagtgagtatcagtgtaacagccagatcctacttcatccccatgtagaggtggagggactgagtgaacaggcttggtgtgcagaagatgcaggccaggcaagcctgtgcataattttggataatgaaaaatactatgaggaaaataaatctagccaggtgcagtgactcacgcctggaggcctagcactttgggaggccgaggcaggcaggtagcttgagttcaggagttcaagaccagcctgggcaacatggcaaaacttcatctctacaagaaatacaaaaatttttgccagggatggtggcacacacctgtagtcccagctacttggagggcctgaggcaggaagattgcttgaatccaggaggctgaggctgcagtgagtcaagatcccaccatagcactccagtctgggtgaccatatgagaccctgtttaaaaaaaaaaaaagaaaagaaatctaaactgcataggggtcttagggaagggctctctgagatgacatttaagctgcaatttgaaggacagtggttagggtttggatgtcaatacataacaacttcttctttgcccaagttctgacacaacagagagcagatgaggaatcaggtatattgaaatcaaaataacacttccttactgttccattcactgttcctgcatgacaaaccacctacaaaccacctggtgtttagtgtgcaaaataactgatgctcatggtttctgtgggccaggaggtcagagagggcacagcagggatgacttgtctctgccccatgaagtctggggcctcagctggaaagactcaatggctatgaggtccttgatggctggggctggaatcatctggagttgtacatgtctggaaatggatgctggctgtaggctggcacctcagcagggccttgagccagcacatctacacatgacttctccatatggtctctccacctgggctggcttggctccctcatagcatgatggctgggttcccagggagaatgtcctaacagaccacgtggcttttttcttcttctttttttgagatggagttgtgttctgttgcccaggctggagtgcagtggcacaatctcagctcactgcaacctctgcctcccgggttcaagtaattctctgcctcagcctcccgagtagctgggattacaggcgcctgtcaccatgcctgggtaatttttttttttttttttttttttttttgagacagagtctcgcttgttacccaggctgcagtgcagtggtgcgatctcagctcactgcaacctccgcctcccgggttcaagcgattctcctgcctcaggttcctgagtagttggggttacaggcgcccaccaccacgcccggctaatttttgtatttttagcagagacagggtttcatcatgttggtcagcctggtctcgaactcctgatctcaggttatccacctgcctcggcctcccaaagtgctgggattacaggcatgagccacggcgttgagcctatttttttgtatttttagcagagatggggtttcaccattttggccaggctggtcttgaactcctgacctcacaatccacccacctcagcctcccaaagtgctgggattacaggcgtgagccaccccacccgggcccacatggcatttttatgatctagaagtcacatagcaactttcaccatattctgctgtttaatgctgtcacaaaggtacatccaggctgaaggaagggggacatagatcccacactcaagtgtcaaggtcataattgtacaatgagcatgtcgaattggagatattgataggctatcttctttgaaaatacaatttgccacaattcctgataaactagtttgtaaagcatagctttggtctgtgggtgagaggccgggtgtattgctccggtagagctctctcagatggaacaggtgagtgggaataagacttgcccttgagagaagagcatttcagcagagggaagagcaattacaaaggccctgtcatgggcaaggtgggtgtgttctaggaactgaagcccagtgtggctggggcatggtgggagagcaagagaggctgatgaagaagctgtatttggaaggtttggtagtggggaccttgaacgtcaggctaaggagtttattgggaagccagcggtgccaagaaaggctcaaggataccatgaggctgtccccacataggctgtccccacatctgggggccaaatacccatgcccatgtgcaggagccaattgtgtctcagagaagacagaggccctggcctccaggatgtgaaggcactagtgcctacccctagggctgatgtgacacctgcactcccagatctcaccacctcagcccctttgccaggttggacgcctccctcagccccactcctctagtgtgtctgccctggtagggaggaggagacggcaatggtatgaagagatctgacctgccccaggaagtttccatctctaggccacctgtcctgtcctgtcccggtgaaatctagccaagggcattcatctaccccgatcatgctatgggttctgcggcaggccaggaaacctgccattagtggccatccactcctatggcagtcccagctcaacgtcagtttgtttttttgagacaggatcttgctctgtcacccaggctggaatgtagtggtgcaatcacagctcactgcagcctcgacctcccaggttcaagcactcctcccacctcagcctccttagttgggactgcaggtgtgcgccaccacatcctgctaattttttgatttttttttttttttttttttatatagagacaaggtctcaccattttgcccaggctggtcttgaactactgatctcaagcaatcctcccacctcagcttcccaaagtgctaggattacaggggcgagccaccgtgcccagccctcagtgttggttctggcctggcgtgtctgtccacggttttagaagcgcttgctggacggtccaccagagctgcgggtcttcccgcgacgtcctccgagcctgagctgctgccgagacaccctcagcgttcggtgattcccatagctccgcagagcctccgctcccacaggtgagctgggtgggccttgctctccgctcctggccagggccctcggctcactgacctcgcccatcggctcgctggctctgccccctcggcgcccggttcccttgctgtcgcctggccccgctccttgtggttagctctgcccactctcgcctctccccgctcctcctgtactagacctcctccctgggttcaaggggctcccgggcctcctgaagggctgggggtctgggtctgtgacgctttgtccagctcctcttcctattttcaccttagggtcctgcgtgaggcctagctcttccacagtatcccctctgggctggcaggccggaggtgggtcctgtgtgatacctagagcctggctggtggggggatgctgaggccatggctcaggtctttgcatctgggcagaatctgggggctccctggagctgatcaagtgagcgtgagctgccatccctcctgctggcaggtctcagcctatcccagagctctcagcatgtcgggcctgtcacgacaagtggcctgaatgccgtgtccggagtcccttccacccttggaccccccgcggttccaggagaagacccttattcctcggctctgggaccccgagtggcctgccttaagggacagtccgtctcttcccaggttcaggaccttgaaaggaggctccgcagttgtcctgcaggctatattcaccgtgagctactcagggccggcctccaccccatggccctcagtccggggctgggcttcccccacagatgttccttatcacagcatcactcaacttctggagcctgatgttcccacagaggcgggggcggaagagggcagggaagaacagaggatcgcctttcccaaatgccttcccttggaagaccctgtgaaactgaggagatgggggaaactgaggcccagaaatggtgccgcttggccagagtggctgtagtagagccatgcatagacacaggccactcactccagtgcagccaccgccctcccagccaccctgaaaaaggtctggcaagactcatgaccttccgcctggcgcagtggttcacgcctataatcccagctctttgggagaccaaggcaggaggatcccttgagctcaggagttcaagactaacctgggcaacataacaagaccctgtctctacaaagcttaaaaaaaaaaaaaaaaaaagacaaggcatgctctcctccaggttcttaaagaaggagtgtcttcccctgtcctctgtccatagggctgttctgtagaacatcctgctcagtgaccgaggtaaggggtggtcctttttttttttttttttttttggaaagggagtctcactctgtggcccaggctgcagtgcagtggtgcgacttcggctcactgcaacctccgcctcgcgggttcaagcgattctcctgcctcagcctcccaagtagctgagattacaagtgccccccccaccacgcccagctaatttttgtctttttactagagacggggtttcgccatgttggccaggctggtctcgagctcctgacgtcagatgatccacccgccttggtctcccaaagttctgggagtacaggcatgaaccacggtgcctggccaaggtgatccttttgggggtctctcacgtttggaattaccttggttggggaaggggaggagcagctcccagagtgaccagcagagggcgctgggcccaacatggtcagttctgggagctggactcttggaactcgggaagactcccaagctgccttctcaaagttttgtctctggcagcgtctagaatggaggtgatgtgcactctagggtccctctaacaccttcccttgagcccctcgccttctaggctcatctgcccccaggactaagccccctccctttatttatttatttatttatttatttattgagacagagtctcgctgtgtcgcccaggctggagtgcagtggtgcgatctcgggtcactgcaacctccgcctcagcctccctagtagctggtactacaggtatgtgccacgacacttggctaatttttgtatttttagtagagacaggttttcttcatgttggccaggctaatctcgaacttctgacctccagtgatctgcccaccttggccccccaaagtgctgagattacaggcatgagccaccatgcctggccagcctttagaaactgtctttagcaggcccctgtggactcactagggtataggaaccctgatggaaggcatgggggctgggcataccccatggacctagagccaggagacctggaaagctctggtctccaggccaccgaggggacccccagccctctcccattcatccaccatccgtatactaacagtcccgggacacatttactgaacttgtgctctgcttcatttgaacacatcactcctcttcttaactttggttgcctcccaccttcattttattttatttatttatttatttattgagacagggtctcattctgttgcccaggttggagtgcagtggtgcaatctcagtttactgcaacctccacctcctgcctcagcctcctgagcacctgggactacaggggtgtgccaccatgccagcttaatcaccttctttaaataaaatccaagctcctcactaccgcctacaggtccttctcggtggtccagcccacctctccctccatccagcctcccctttaaccatgacactctggccaagatgacctctcttcttttgttattgtttttgttgttgctttgagatggagtttcgctcttgttgcccaggctggagtgcaacggtgggatcttggctcactgcaacctccgcctcccagattcaagcgattctcctgcctcagcctcccgagtagctgggattacagatgtgcaccaccacacctggccaatttttttatttttagtagagacggggtttcaccatgttggccaggctggtctcaaactcccgacctcaggtgatccattcgcctcggcctcccaaagtgctgggattataggcatgagccaccgcacctggctgtctcttctgttcagttgtttttttttttttttttgagacggagtctcgttctgtcgcccaggctggagtgcaatggtgcaatcttggctcactgcaacctccacctcccgggttcaagcgattctcctgcctcagcctcccaagtagctgggactacaggtgcatgccaccacgcctggctaattttttgtatttttggtagagatggggtttcaccgtgttagccaggctggtctcgatctcctgatcttgtgatccacctgccttgacctcccaaagtgctgggattacagcgtgagccactgcacctggcctgtctcttctgttttttgaacatgctgtgttttcctgcctctgggtctttgcacaggccttttcctctgcctagaacagaattgtaagccctgtgggggcaggaactatgtctggttttttttggctctatagcccccaacatttatcctggtaaacaagtatgcaataaatgccagctgaaacaggtctttataagttttttttaagtttttttttttttttttttttttttgaggagtctcactctaccacccaggctggagtgcagtggtgcgatcttggctcactgcaacgtctgcctcccaggttcaagcgattatctagcctcagcctcccgagtagctggaattataggtgtcccctgccacactcggctaatttttgtatttttagtagagacgggatttcaccacgttggccagggtggtctcaaactcttgacgttaggtgatctgctcgcctccgcctcccagagtgctgggattgcaggcatgagccaccacgcccagttttataagtaattcttgaataaatgtgcctgagccttgtctattttttttttttttttttttgagatggagtctcgctctgtcactaggctcgagtgcagtggcatgatcttggctcaccgcaacctctgccttgcgggttcaagccattctcctgcctcagcctcctgagtagctgggaccacaggcgcctgccaccatgcctggctaattttgtttgcatttttagtagagacggggtttcgctgtgttagccaggatggtctccatctcctgacctcatgatctgccccccttggcctcccaaagtgctgggaattttttttttctttttctttttctttttttctgagacagagtcttgttctgttgcccaggctggagtgcagtggcccgatctcggctcactgcaacagccgcttcccaggttcaagtgattctcctgcctcagccctctgtgaagctgggactataggtgcgcgccaccacgccctgctaactttttttttttttttttttttttttgagatggagtctagctctgctgcccaggctagagtgcagtagccggatctcgactcaccgcaacctccgcctcccgggttcaagcgattctcctgcctcagcctcctgagtagctgggattacaggtgcgtgccaccacgcccagctaatttttgtattcttagtaaagatggggtttcaccatgttggctaagctgtctcaaactcctgacctcgtgatttgcctgccttggcctcccaaagcgctgagattacaggcatgagccaccgcgcccgcccaatttttctatttttaatagagaaggtgtttcgccatgctgggcaggctggtctcaaactcctgacctcaggtgatcctcccgcctcggcctcccaaagtgctaggattacaggcgtgagccactgctggcctaaaagatgcttctggagtaggaggcattgggcctggctggaaggtttgcgtctgcaaaggcctgaagagaacatcccaggtgggagaaacagcaaggaggggaggtgtggaggaggcagggagaccctgttcttgggactactgtctgcagagggtctccagaggcaggaccccggtagggacactgatgcaggaggcgctctgcagtgcctccccccaatctgtgggccggggtgcccccagggacgcaggctgtgcgctcccacgccctgccgaagcaggacgttcccacgctggggcggccccgagaaaggctgtggggcgggccgggggcgggcgcccgcactcaggtccctccgcagcgggttctcagttgctcgctgggcagacccaggtcgcgctcccactgccgagcccgcgaggtgagtgagttgggggaggaccccgccacccaagcccgcgcgggtcaggggcgcggctcggtctcctgccttcgccgctgggtcacgccccagtggtccctgtcttagagggttggggggcttcttgtaggttagagttgaagactcctggggagtctgcatatgtgtgccatctctttccccaaatatagattacatcctccctctcttgatatgtggagctctcccacccactaatcataatcactggccggagcccctcttttccagaagtgtgggccgccccctcccacttatcacctgtagtgtgccccctccctcactctatttgttgggtgcccctctctctccctagatgtgggactccccttcttttccccagatgtgtgtctccctccctctgacccagttaagtccccatcctctaaagcccctccccaccaccatggatgccaaaccctgagtcttccctgggggtgggagactgggctcagccagactggctaagcccagtccccaccccaaccagatccagcagagcaggcctgtgtgcacgtaggcagccaattaggggggaaggggtgggggccagaccgtctgtctgttctgccggtgcaggggcctctggcccctgcagggaagagagactcaagaactgctccctctccacctggaccccacccagcttcctctggggagcaaacaagtgagcggggttctccaatctggccagactgagctggggctggcaccagaacccaagccctcagcctcaaactcttcagaccctggcccaagacttaggcctcctcccacttctcagatggtgaattgaggtcccaaaaaggggcttcaaaggtctaggacccccattggccccccgctggggatatcagacaaaattagaagggtcaagggcatgagggtgaccttgaaacactgggacacccctaccactaccataccagtggaaaaggatttttccatctggccctgcggtttgggggcagagggtgatgtgggggcagaactcatctataccttcacgcccccagatgctccccagagctgcctggagcttggtgctgaggaaaggtggaggtggaagacgagggatgcacagctcagaaggcaccagtgagacctggactccttcctccctgcctaactccagagataggggcaggggtcccctctgcaggctgccccctttgcccttccatgccaccctgggcctgttcctaccacacttcccatgttcccatgatcccactccttggtccaaggtcaagtttctccaggaaatggagtgcgcggggtgagcagacagtggtcatctccattccaagcttccttaggagccagcccccaagcctcaggcccctagaccttttgttctgaggtggaggatgctgacagaaccttggaccctgattcctcctttccagaccctagtttcaatgctagtaagaagaaagagacctaaagtaggagagacttcagccagatagcagaagggccttgctgacccatggagaataacaaagataacatttattgagcccttactagtaccccaagctattataaacctcctttttttttttttttgagatagagtcttgctctgtcgctcaggctagagtgttcagtggcgcaatgtcggctcactgcaacctccgcctcctgggttcaaacaattctcctgactcagcctcccgagtagctgggattataggtgcccaccactgcgcccggctaatttttgtatttttagtagaggagaggttttactgtcttggccaggctggtctcgaactcctgacctcgtgatccacccgcctcagcctcccaaaatgctaggattacaggcatgagccaccaagcccggccaccttctttattaatatagttagagatagggtgtcccaagggcagcctggactcagctccctccattgtgtctgcagcccgtggtggggggaagatgtccccctacaccaactgctatgcccagcgctactaccccatgccagaagagcccttctgcacagaactcaacgctgaggagcaggccctgaaggagaaggagaagggaagctggacccagctgacccacgccgaaaaggtggcctgtaagtgtcagggtggggctggctggagagagtgggttgggggctgactttggaaagaatggcctgtcagggatcagagggcagagagaggcccccaagacagccagaaacctccaaacacctgaggggtgaagttcatgcctttgttcgtttctttattcactcacctgtttgtgcatagcctgatgctaggcaatgctggggacatgaggtgaatcacctggatagttcctgcccccatggtgcccccggtcccgtggggaaaaccaatacagactccaataattgtaatacagaacatgtggctagggtgaggtgtgttcaaggactgtgagatgaaatcttggtggacctcccagaggagggcacattccagctggcctttaagggtgaagaggagggcactgccagggagtgggaactgcatggggaagggtgtcagagcaggagactgtggagggccctggaattgagtgatgtgggggagatgggacagagagaggcaggtgaggcggttggggaggagccctctgaccctgggaggctggagggatgtgtggtcccttgtcatgtccaccagagcatccctgagctgaccctttgaaatttggagcaccttattttcattccatgaatgggaacactcagcctgacctccaagatttcaagggattcctagtggggaaaggttcatgcttctcacattcattcattcagtcaacatcttatttggcacctactacaataccatgcactgggaatgcagctgtgagccagccaggctccgttcctgcctgtgagcttgcatttccagccctctctcagcacctttaccccttctctctctctctctttctacacacacacacacacacacacacacacacacacacacacatcttggttttttcttcatccatttcagaaattgacactcttggggggagaggggaggaatagcattaggagatatacctaattctaaatgatgagttaatgggtgtagcacaccaacatggcacatgtatacatatgtaacaaaccacatgtaccctaaaacttaaagtataataataataaaatttaaaaaaaaaagagaaattgacactctttatctgagcatggtggcacatgcctgtcgtcccagctatttgggaggctgaggcaggaggatcacttgagcccaggggagctgaggctagagtgagctgtgattgtgctacggcattgcactccagcctgggtaacaaagtgagaccctgtctgaaaaaaaaaaaaaaaaagagagagagagaaagaaatgatggacattccccaagcaagatgataatgagcaccatccctaatatgtcctgcacgcttacatgtagcaggcaccgctgtggcgttaggttgctctcgttagctcacatttgagagactgaggctcagtggcgtgcagtcacttacagtggttgcacagctagagagtggtggaggcaagatttgaaaccacatagacaggcaccaggggtttcacccttagctgctacaccacattagctacaatgaaggtttggtgggatgcttggggagtttcagtgtaacctcacagctcaaacaactttttttttttccttttctttgagacagggtctctgtcacccaggctggagtgcagtggccccatctcggctcactgaaatctctgcctcctgggctcaagcgatcctcccactttggcctcctgagtagctgggactacaggcgggcgccaccacacctggctatttttttttttgtattttttttgtagagacagggtttcaccatgttggccagactggtctcgaactcctgatctcatgatccacccacctcagcctcccaaagtgctgggattacaggggtgagctaccatgcccggctatttatttatttatttatatttctgtagagacagagcagtctcactatggttgctcaggctggtcttgaactcctgggctcaagcaattctcctgcctcggcctcccaaagcactgggattacaggcatgagccatcatgccaggccaaatgccttgagtcttgtcagacctcttccagggcaggcaggcgtggcagcactggagtgcatggcctgtgtctatgcatggctctaccacagccacactgagtggcctccactggttgatttcattgtctcagcctgaaccgcccacccaagtatcttcccaaaacctaagacagttcccttttcccaaggaattctgctgccagctttgattttcctttagatatttattttcatatttatttaatgtactgagaaaggattacacacgtagggtaattttttttttttttttttttttttttgagacagagtctcgctctgtcgcctaggctggagtgcagtggcatgatctcggctcactgcaacctccgcctcccgggttcacgccattctcctgcctcagcctctcgagtagctgggactacaggtgcccgccaccactcctggctaatttttgtatttttagtagagacggggtttcactgtgttagccaggatggtctcgatctcctgacctcgtgatccaccacctcggcctcccaaagtgctgggattacaggcgtgagccactgcgcccggacttacctggctaatttttaaattttttctagagacagggtctcgctttattgcctaggatggtcttgaactcttggactgaagcaatccacccgtcttggtctcccaaaattctaggattacaggcatgagccaccaagcctggccccctccctaattctgttagaatgaaatccaaactcttctccatggattctaacaaggtcctgtgtgaaccggctctgcctctcatttgagagagccagcctctcatttgctaaattctctctcttttgctcatttcactccagctacagtggtcctcacttcacactttccctacccacttcctgcttcagggtttttgcacttccttccagttttcaccaactttctcccattgatttttcaaacctcagctccaatgtcacctcctctgagacaccttccctggccagccaactgtttgcctgaagcatttgccattgtctccccctctaaactccacaagggcagggattttcatctggctcattcactgctgtcacctgttcctggtcatgctgtgcatatagtacgtgctcagtaagaatttgctgaatgaacagcatctgctgcagggagggggaagccgggatcacttagagtggacgcacctgaggccccttccccacacccaactgcctccagtgtaccggctccagttcaatgagacctttgcggagatgaaccgtcgctccaatgagtggaagacagtgatgggttgtgtcttcttcttcattggattcgcagctctggtgatttggtggcagcgggtctacggtgagtggcaacacctcatctggctgcagtcctgggccatgcccttgtggtcacggccaccagacagtttcttaaaggaaccatgctggcactcatctgaagagctgaaaatttctgaagaggtgtagggtgaaggacagagcatggctgtctaggtttgaatgcaggaactttacctctctgggcctcagtttcgtcatctctaaaatgggaatagtaatgttccatctcagggtacttaagaggattttaatgagagagggctgtaggccagtgtttggctcatagtcatgaatggtgttgtaactgattgttgtgtatgaactgtgtgtttttcagtgtatatatatactgaacttctgcctccccagttcaaatgattcccctgcctcagcctcccgagtagctgggactacaagagtgtgccaccacgcccggctaatttttgtatttttagtagagacagggtttcgccatgttggccaggctggtctcaaactcctgacctcaagtgatccgcctgcctcgtcctcccaaagtgctgggattacaggcatgagccactgtgcccggtggcctgtccccatatttttaaagtgaacactcttacctacttcctactttcaaccctcttagaaagtaaaaggaattatttcatcctggaccctgcccagcaagtgggaacaaactcagtaattatataattatagtaggtaacatgtatcaggtgcttaatatttgtctaacattgtgccaacagctttggaaatactcagtccccacaatcctagtggataggacctcttttgacaggtaaggaaactgaggctcagagagatgaagtgacttgttgaaggtcgcagggcaagggagtggtagagccaggatttggattcaggcagtcttcaaatcagtgatcttattaccacagaccacagaggtaggtgaggtgactgagttgtgaaggaccttggcccagctcccacagtccttggggtctaaggcaaagctggggtcagaacccagaggtgcctgggacgatgctctaggagaaagtctggggtgcggggctagacagggtggagtgagctcctcagtgcaagatacttcaaccctggagtatcttgtaccgtcagccttgcgagtggctgggaggctacagggtggctggagaccctggctggtgtaggaagactggcaggatcctgatccaccccatgtactccctgcagtatttcctccaaagccgatcaccttgacggacgagcggaaagcccagcagctgcagcgcatgctggacatgaaggtgaatcctgtgcagggcctggcctcccgctgggactatgagaagaagcagtggaagaagtgacttgcatccccagctgtctccctgaggctccgccctggctgggagcctctggcggcccctcccctcccctgcccttaaccccagtaaagctccaaaaaaaaatttattctcttctgcctctcaccaccacttcagactttacttggcacctaaaattaggcattttaacaggtgaggggcaagaagggctcagaactcatctagtcaatgagggcttcctggaggagtgggggctacagccaaggcttaggtgggattaggaaaggcaagaagaagggaaggcattcggggtggagcaagtggcttaatcaaaggtgagaacactcttttattcagctaattaacaaatacttggccgggtgcgatggctcactcctgtaaccccagcactttgggaggccaaggagggcggatcacttgaggtcaggagttcaagaccagcctggccaacatggtgaaagccccatctctactaaaaatacaaaaaattagctgggctacttttacacccagctaatttttgtattttttttttttttttttgagacggagtctcgctctgtcgcccaggctggagtgcagtggcacgatcttggcttactgcaagctccgcctcccgggttcataccattctcctgcctcagcctcccacgtagctgggactacaggcgcctgccaccacgcccggctacttttttgtatttttagtagagacggggtttcaccgtgttagccaggatggtcttgatctcctgaccttgtgatctgcccgcctcggcctcccaaagtgctgggattacaggcgtgagccatggtgcccagcctagttttttctatttttagtagagacagggtttcaccacgctggccaggctcgtcttgaactcctgacctcatgatctgcccgccttgacctcccagagtgctgggattacaggcatgagccaccacgcccggccttttttattggtagagacagggctccactatgttgcccaggctggtctcgaactcctggcttcaagtgatcctcctgcctcagcctctcaaagcgctgggggattttattctaagtgtgatgggaagctgtgtccatttgggttctttgagaagcaaatgccaagaaggaattaaccatgtgaagagatttattgggggtgatgcctgtgagagataaaggagagaggaagcaggagtaggttgggagaatcttcagactgtggtgcagatctgacacctgtggaagaaaagaagggaagaaaggagagttgcataggaacagcctcagacttcagggcctctggatcattctgagtcccatcaggagacagaaaccacaaagcaatttaaacgggttgtttaatataaaaaaattattaatcttacacaggaaagtaaccataaagatgcgaaggccgggtgtggtggctcatgcctgtaatctcagcactttgggaggctgaggtgggcagatcacctgagatcaggagttgaagaccagcctggccaacatggaaaccctgtctctactaaaaatacaaaaattagccgggcatagtggcacacacctgtaatcccagctactcaggaggctgaggcaggagaattgcttgaacctgggggacggaggctgcaataagccaagattgcgccactgcactctagcctgagcaacagagcaagaccttgtctcaaaaataaataaataaataggcaaaggccaagcacagtggctcacgcctgtaatcccagcactttgggaggccgcagcgggtggattacctaaattgcgagtttgagaccagccagaccaacatggagaaaccccgtctttactaaaactacaaaattagccaggcgtggtggcgcatgcctttaatcccagctactcgggaggctgaggcaggagaatcacttgaacccgggaggtgaagtttgcagtgagccaagatcacgacattgcactccagtctgggcaacaagagggaaactctgtctcaaaaaaaaaaagaaggcacagagacctttaaaaggtacccaaggagagtccccaaggaaagataaacttgataaacttggaagggggtgccctccccaagtgaggctcagacctcactggagaaggtgtggttggttgcagcccactggatggcgagaagttgggtggcttgcctacggccaaagctggtccatagtcccctgcgtaagcaggaataaccctcagagggctaagggagctgagactggtgggcgggtggaattggggcacatttgcagatgtgaggcctaaagcttgaggcatctgcatcaggaggattgctggaagatggtccccgggcctgaagcctgcaatgttgctataggctatgcacactgggctcatggctggggcagatcaccactaaatgtcctcaccacactgctaagcaaccaaaaaacaggagcaagaacagcgcgtgcacacacacacacacaaacctcctctcctcctgaaagtctcttctagcactgactacttgcaaagctcagcatctcactgtcaaggagttcagttcatctccagtgtgcagagcagagtgcatttggagctgagcagtaatacattgataactggcccagcatctttcagaaagtcttggctaggccagtgggaagtcccagagcagtaatgcccgctagaggagtcctgtattgggcaaaattaatgcatccctagtgtattagggttctctagagggatagaactaataggatagatgtatctatgaaagggagttcattaaggagaatttattcacacgaccacaacgggaagtcccacagtaggccatcggcaagctgaggagaagccagtctgagtcccaaaacctcaaaagtaaggaggacgatagtgcagcctttagtctggctgaaggcctgagagcccctggcaaatcactggtgtaagtctaagagtccaaaagctgaagtctgatgaaaaacttggagtctgatgttcgagggcaggaagcacccagcatgggagaaagatgaggccagaagactcagccagtttagtacttccacgttcttatgtgtgattatttatttatttatttatttgagtcggagtctctctctgtctcccaggctggagtgcagtgccgtgatctcagctccctgcaacctctgccccctaggttcaagcaattctcctctctcagccttctgagtagctaggattacaggcatgggccaccagcctggctaagttttgtatttttaatagagatggggtttcaccatgttggccaggctggtcttgaactcctgacctcaggtgatccgcccacgttggcctcctaaagtgctgggattacaagcatgaaccaccacacccggcccctctgtctacttttaacccagctgtgctggcagctgattagatggtacctacccagattgagggtgagtctgcctctcctagtccactgactcaaacattaatctcctttggcaacaccctccaagacacacccaggaacaatactttgcatcctttaatccaatcaagttgacattcaatttttttttttttttttttttttttgagatggaatctcgctctgtcactcaggctggaatgcaatggcgcgatctcggctcactgcaacctctgcctcctgggttcacgccattctcctgcctcagcctcctgagtagctgggactacaggcgcccaccaccaagcctggctaattttttgtatttttagtagagacggggtttcactgtgttagcaggatggtctcgatctcctgacctcgtgatcctcccacctcggcctcccaaagtgccgggactacaggcatgagccactgcacccagctgacactcagtgttaaccatcacacctagtaactccattgtgctcagtccctggttgggagcggcccagaaagatcatggcctcagcatgaacactacagcaggtctgaaagtgtggcagctggaggtggtcacacaactaccctcttcatagcaggttctcttgaagaatctgagtagcacgtctccatagatgccctaggtgccaaaggaagaatttagcaaagcagttgtgacaacagtcattcaaccaacaaatatttattgtggattttaacttaatcagctatttatttatttatttatttatttatttatgagacagagtttctctcttgtcgtccaggctggagtgcagtggtgcgatctcggctcactgcaagctccgcctcccgggttcaaggagttctccttcgttcaagcagttctcctgcctcagcctcctgagtagctgggattacaggtgctcaccaccacacctggctaattttttgtatgtttagtagagatggggtttcactatgttggccaggctggtcttgaactcctgacctcgtgatccacccgcctcggcctcccaaaatgctgggattacaggcgtgagccactgtgtccggcttaatcacctcttttaaaaggtcttatctccaaatgcagtcccattctgaggtgctgggggttagaacatccacatatgaatttggggagacacaattgagaccacaatagttgggctcagggctaggcacggtggctcacggctgtaatcccaggatttgggaggctgagcagggcagatcacttgaggccaggagttctagaccagcccggccaacatggagaaaccccatctctactaaaaatacaaaaattagctggatgtgttggtgcacgcttgtaatcccagctacttgggaggctgagacacaagaatcgattgaacccagaggtgaatgttgcagtaaaccgagattgtgccactccactccagcctgggcaatagagcgagactctgtttcaggaaaaaaaaagttggactgaaggttattctgtttgtctttttgttctgggaccagtggacacctagggcatgttcttctcatggcagaagtctgagactttggcagggcagaggaatgggtggggacactcttaaagtccaggcccaaaacaagcacacacaaaactgcaccacattccactggccaaggtattccaattatgattgctgcattacaaacctacctgagactgactggcataaaacaattattttactatgttcagagattctgtgagtcagggatttgggccgggtatggtggaaaccccttgcctctgctctagaacatccggggcctcagctggaaacactcaagggctgtgactaggattggctggaggtgttttcactcacatatgtagcacttgatgctgggaccacagctggacctcagatcaactggaacaccactttgtggcttccctccatggtcactctgtgtggactagtttggtctcccttaaaacatggtagctggaggtcgggtgaggtggcttatgcctataatccctgcactttgggaggctgaggtaggcagaccatgaggtcaatagatcgagaccatcctggccaacacggtgaaaccctgtctctactaaaatacaaaaattagctgggtgtggtggcatgtgcctgtagtcccaactagtcgggaggctgaggcaggagaatcacttgaacccgagaggcggaggttgcagtgagccaagattgtaccactgcacaccagcctggagacagagcgagactcggtctcaaaaacaaaaacagtggctgggtcccaagagagcgaaggggaagtgccttgtctttctttcttttcttttcttttttttttttgagacagagtcttgctctgttgcccaggctggagtgcaatggcgccatctcggcttactgcaacctctgcctcctgggttcaagcgattcttgtgcctcagccacccaaatagctgggattagagacgtgcaccaccacgcccggcttttttgtgtgtatttttagtagagatggggtttcaccatgttggccaggctggtcttgaactcctgacctcaggtgatccgcccgccttggcctcccaaagtgctgggattacaagtgtgagccaccgtgcctggcctgcatggtctttttatgattcagcttcagaagacaaaaagcatcatttctgctggagcccaatggtcaaggcactaccaaaggtacacccaggttcaagagggagaggacatggagtccaccacccagtaggaggacatcaagatcccattgtaaaatgtggtgtgcatgggagaagggaaatttcttcttttttttttttttaattttattttaagttccaggatacatgtgcaaaacatgcaggtttgttacataggtaaacgtgtgccacggtggtttgttgtacctatgaactcatcacctaggtattaagccccgcgtgcattagctatttgtcctgatgctctccctcccctcgcccccacaggccctggtgtatgttgttcccctccctgtgtccatgtgttttcattgttcagctcccacttatgagtgagaacatgcgatgtttggttttctgttcctgtgttagtttgttgaggatgatggcttccagcttcatccatgtccctgcaaaggacatgatctcattcctctctttttgagaccaagcctcgctctgtcacccaggctggagtgcagtggaacgatcatagctcactgcagactcgaactcctgggctcaaggaatcctcccgcctcagcctcccaaagtgctgggattacaggcatgagccctgcacctggccaagagggaaaatttttgagatcattttcgaaaatacagtctaccacccgaggtcaagcccagtgtcgatggacagataaatatcctacagccaggatgtgcatggaggcatgaggagagaaggcagaattgtgagcagataataaaatattctacagatgtggagaaatgaccaacacaaaatgaagttgaaggctgggtgtggtggctcacacctgtagtcccaacacttttggaggttgaggcaggaggactgcctgaggccaggattttgagattagcctgggcaacataatgagacctatctcattacggttgttgttgttgttgttgttgttgttgttgttgttgtttgagacggagtcttgctctgtcgcccaggctggagtgcagtggcgcaatctcagctcactgacacttccgcctcctgggttgaagctattcttctgcctcagcctcctgagtagctgggattacaggtgcatgccaccatgcctggctaatttttgtatttttagtagagacagggtttcatcatgttggccaggatagtctccatctcttgacctcatgatctgccctcttggcctcccaaagtgctgggattacaggcatgagccaccacgcctggctgtgtctcaggtcttaaggtccctagctggtcagccttctttccacttttcagagtttccttttctttttctttctttcttttttttttgagatggagtctcactctgtggcccaggctggagtgcaatggcatgatctcagctcactgcaacctctacctcctgggttcaagcagttctcatgcctcagcctccttagcagctgggatcacaggcatgagccaccatgcctggctattttttgtatttttggtagatacagggttttgtcatgttgggcagaatggtctcaaactcctggcctcaagtgatccatctgcctcagcctcccaaagtgctgggatgacaggcataagccaccgcgcccagcctgagttttcttattcttattttatatacagtgtcaaaggttcttagttttacttaggaggagaaatagggaaaagtacatctgctccatcttcctggatgtggaagtccagtggttcttcctaatatatattaaaatatcttttgatatataatctctctctctctccctacccctccctccccttccatttcatttgttgaaaaaaattgagtcatttgtcctgaggatttcccccagtctgtattttggtaattgcaatcccatgtgtctcttattatgcccctctgtccccgttgttttctgtaaatggtgattacatttagaagcttagactcacgcttgatttttttggcaagaatattttatgggtgtgctgtgttctcttggcaggcagcacatgacgcctggttgtctttgtgtagcattagcagctttcattggtcattgtgtagattcattaacttattaggagtacagatggctttcaaatacatgaaaagatgccaacctcaattagatttttaaaaatgaaattttaaagtatgagtactattttttcatctaccagattgacaaggatcagagtgttaacacgaatgttggcaagagtgcagaggacaggcgatttcataggctgcctgattggactgtatccatcaaaatgactaatgtatacaccctttggcccagcaattctacttttagggatgtaccctgtggatacatgtgcatatatgcaaaatgatggattgcagtattgtttggattagcaggagttaaagcctgggcaacatagtgagaccttgtctctactacaaataaaaaaatattagccgggcatggtggtgcatgcctgtggtcccagctacttgggaggctgaggtgggaggatcctcaaatttgggaagtcaaggctgcagtaagtcacgatcatgtcactgcgctccagcctgggcaatagaacagaccctgtctccaaaaacaaaaacagtaacaacagaagttgagaactaccaaattgttccacctggagtgctacaaattatcacaacttgtggcagacgctgtgggcaatgtgcctgcaggatgctctctgaagctttggtggacagttctcattaaagggaacagccacctgtgtgtttttgaccaagcatggggcaggcaggaaatgccaaacgtcaaggagaaagtcctgaagcagccctcctcagccaatgagggatgagttggtggataaacaccttggtgttcttttccctcagtgatagaattttgagcagtgttccacgggtttttcaaaggatgccctggtggaggagccccattgcctggagtggcagcttactcattattacaccctatattggctgcctgtccttccttgtgtcacttccccacttaaatcatttgcccctgaatctttattctaggctttgcttttgggggaaatctacactaaggcagagcttggtggtggtttggcagcacagtctgatacaatttatagtagttactataaaaaatagtacttacagccgggcacggtggctcacacctgtaatcccagcactttgggaggccaaggtgggcggatcacaaggtcaggagatcgagaccatcctggctaacacggttaaaccccgtctctactaaaaaatacaaaaaaattagccgggcaaggtggcgggcacctgtagtcccagctctgtgggaggctgaggcaggagaatggcatgaatccgggaggcggagcttgcagtgagccgagatggcaccactgcactccagcctgaacgacagagagactccgtctcaaaaaaaaaaaaaaaaaaaaatagtacttacagtgccagataccatccttaagcactttacgagcattaaacctgtgtaactacctcatgaagtaggtatgattagcacccctattttttaggcaaaaaactcaggaacagagaggttacgtcacttgtccaagggcacctgcctcccctgggcagtctcgtttcagggtcctgctccaaaccattacactatcctttctctggtcccctgctgctccaccagcatgagctgagcttggccacggttggcctcttcgtttctggacctctactgtagtggtcagctgtggagaatggccatccacctaccctctacagtttgttttccaggtgcccagagagcttggcacaaagttcaggtaagattgatatacccttttggggacagccaaacagctgcggagggatgttccacttcataaatggtttgtaaactacagccctatcattattttaatttattattattatttttacagtgcaatcatagcagttatttctgggggaggtttgtttgttttttaagtttttttttttgtagggatggagtcttggtatgttgcccaggctggtctcaaactcctgggctgaagcaatcctcctgcgtcagtctcccaaagtgggattataggcataagccaccacgtccagctttttgtttgtttgtttgtttcgagatggagtttttgctcttgttgcccaggctggagtgcaatggtgtgatcttggctcactgcaacctccacctcctgggttcaagtgattctcctgcctcagcctcctgagtagctgggactacaggcacctgccaccacgcccagctaatttttgtatttttaccagagacggggtttcaccatgttggccaggctggtctggaactcctcacctcaggtgatccgcccaccttggcctcccaaagtgctgggattacaggcatgagccaccatgcctggcttgttttttacatcagtgcaattagagcctgacgtgggcacttgttgacgtgggtactggtcatttcctattcagcaacaaatttacaaaccatctcgttggccaggccactatgttatgtttatattattttctatttcatattcagaaaaactttttcttgctttatgtccacattcttggtatcttagtattttaaaaatgagttcctcaaattttaacattgacttgttaacagttcgtaatatggccatttaaatttcatttaagaacttcaagaattcacaagactctctataatgaaattattaaaactaattatttatatgtgaatttattgaaatgagatggcttaaataattcaggagagaatactcaacatggtcagaattctcatgtgagtttgtgcatattaattaaaaatcaggccaggcgcagtggctcacgcctgtaatactagcacttggtaggccaaggctggcgaatcgcctgaggtcaggagttcgagaccagcctggccaacatggtgaaaccctgtctctagtaaaaatacaaatttagctgggcatggtggcaggcacctgtagtcccagctactcgggaggctgaggcaggagaatcacttgaacccaggggacagaggttgcagtgagccaggatgcaccactgcactctagcctgggcggcagagcgagactctgtctcaaaaaaaaagaaagaaagaaatgaacatatatgatctatataaatgtaggtcttctttgatttttatttatttattttatttttttcgagatggagttttgctcttgttgcccaggctggagtgcaatggtgtgatctttgctcactgcaacttttgcctcctgggttcaagcgatcctcctgcctcagcctcccgagtagctgggattacaggcatgcaccaccacgcctggctaattttgtgtttttagtagagacggggtttctccatgttggtcaggctggtctcgaactcctgacctcaggtgatttgcccacctctgcctcccaaagtactgggattacaggcgtgagccaccgcacttggctatgcccagccatttctattattttctttttctttctttccttttttttttttgagacggagttttgctattgttgctcaggctggagtgcaatggcgcaatctcggctcactgcaacctctgcctcctgggttcaagtgattctcctgcctcagcctcccgagtagctgggattacagatacccaccaccatgcccagctaatttttttgtatttttagtagagatggggtttcaccatgttgccatgttggccaggctggtcttgaactcctgacctcgggtgatctgcccgccttggcttcccaaagtgctgggattacaggcacgagccaccacgcatggcccatttctattattttctatatagtaagaaatagttcttgttatttttgcctcatgacaaaggctatgatggtagagatagaaaaatagaaagctgggcattatgtaatacattattttattgtactttgtgtgtgtgtgtgtgttttttttttttgttttttgtttttttttgagacagcctctagctctgtcacccaggctggggtgcaatggcgtgatcttaggtcactgcaacttccacctcctgggttcaagcgattctcctgcctcagcctccagagtagctgggattacaggtgcgcgccaccacacctagctaatttttttttgtatttttagtagaaatgggatttcaccatgttggccaggctggtctcaaactcctgacctcaagtgatctgcccgcctcagcctgtcaaagtctggaattacaggcgagagccaccgcggccagtcgattttattttattttctgagtcagggtcttgctctgtcatccaggctggagttcagtgatgtgatcacagctcactgcagcctcaaccttctggtctcaagcgattatctcacctcaggctccctattagctgggaatacaggcacgtgccaccatgcccagctaatttttgtatttttttgtaaagacggggttttgccatgttgcccaggctggtctggaactcctgggttcaaacaatctgcccacctcagcctcccaaactgctggaattacaggtgtgagccaccacacctggcctatgtaataaatttgatcatgacataagttgctggtttttctgcgtgatttgtcaatttttaaaaattgcacaagtgaaccaggcacagtggttcacatctgtaatccctaaactttggggggttgaggcaggaggatcatttgagcccaggagttccagaccagcctgggcaacataaggaaaccctgtctctatttaaaaaaaaaaaacattgcacaagcaatacacaaaattattatcttaaacttctatagacccagaagactataaagaagtgaaagctggctaaaaagctttttttttttaaatttaataaatcatgaacaggtgttagctgggcaccgtggctcatgcctgtaaccccagcactttgggaggccgaggcaggcagatcaccggaggtcaggagttcgagaccagcctcgctaacatagcgaaaccccgttgctactaaaaatacaaaaattagctggacgtggtggcgggcatctgtaatcccagctactcaggaggctgagtcaggagaatcacttgaacttgggacgtggagactgtggcgagtcaagatggcaccactgcactccagcctgggcaacagagcgagactccatctcaaaaaaaaagaaaaaaatgaacaggtgttgaattttacaaaatactattttcatatctcctgaaataatcataagcattttctttgttaatttttcaatacaataaattacatagataaatttcttggctgggtgcggtggctcacgtctgtaattccagcactttgggaggccaaggcaggcggatcacttgaggtcaagagtccaagaccagcctggcaaacatggtgaaaccctgtctctattaaaaatacaaaaattagcctggcatggtggtgcatgcctgtaattccagctacttgggaggctgaggcaggagaatcacttgaactttggaggcagaggttgcagtgagccaagatggcgctactgcactccagcctgggctacagagtgagactccgtctcaaaaaaaaaaaagaaagcaaaaagaaaaaattcctatatgtagtcaatcttgtttacctggaataaaccctacaggttgtgatatattattcttttaatattatgttgtttgttaatattaggtttggtttattaatattataactttggcatacatgttcataagtaatagtgaccaataattccctttcttttccttcctttcttccttctttccttctgtgtttccctcactctctcccttctttccttccttcctctctcttccttggtgctgtacagccttgcccagttttttttgttttgttttgttttgttttttgagatggagtctccctctgtaacccaggctggagtgcagtggcacgatctcggctcactgcaagctctgcctcccaggttcatgccattctcctgcctcagcctcccgagtagctgggactacaggcgcccgccaccacgcccagctaatttttttgtatttttagtagagacggggtttcaccgtgttagccaggatggtcttgatcccctgacctcgtgatccacctgttttggcctcccaaagtgctgggattacaggcgtgagccactgcacccggcagccttgcccagttttaataacagttataatggtaaagaaagaaagaagagtttaaaagatttatatcttttcctgttttctgaactcattattttaaaatattcaaaatgaaaacgtacatttggattgatttcaaatccaactgaatacaagaaatattgacattaatttgtcagttatagaaaggaagagctattagaatgtttaaatataatttcaatagtaagctttggaatggcttacatttttctcttatttcctacttgagattataatgtctccttttttctgtttttttttttttttttttttttttttgagatagagtcttgctctgtggcccaggctggagtgcagtggcacaatctcagctcactgcaacctctgcttccctgtttcaagcatttctcctgcctcagcctctcgagtagctgggactacagatgtgggccaccacgcccagctaatttttgtatttttagtagagatggggtttcacccgggttcaagtgatctcaccatgttgccaggttggtctccaactcctgggcccaagcgatcctcccacctcggcatcccaaagtgctgggattacaggcataagccaccatgctgagccctgcgtgagccatttctttctttctttctctttttttttttttttttttttttgagacggagttgcgctctgtcacccaggctggagtgcagtgacacaacctcggctcactgcaacctccgcctcctgggttcaagcaattctcctgcctcagcctccagagtagctgggattacaggcacacgccaccacgccaccattcctggctaattttttctgtttttttttttttcagtagagatggggtttcaccatgctggccaggctctggtctcgaactcctgacctcatgatccgccaacctcagcctcccaaagtgctgggattacaggcgtgagctaccgtgcccggccgagccatttcaataataaaacctcatataaaaagttgcatttacaggaccaaagtcaagtttttaaagaaaaaattttaaaatattttatgtatttagatgttttaatcaaagataaaacttcatattttctctatgaaatatatttcatttctttcatcataaatatgtaatatatggaaattgaatgagtttttcaccaagaaccacatagagagtcccaaaccccctccagctttccctttgtgcaattccaagcatgttccatggcaatatataaagttgggaatcactgagcggtctggttaaaaacttgtggaataccacacagctagaaaaaaagaataaagttgacatcagttggtaattgttgaaactgcctggtgagtacatggggattcatgtgtgaatatggaaacttctacaaggctgggctaggtggctcaagcctgtaatcccagcactttgggaggccaaggtggatggatcacctgaggtcgggtaaacacaaaaattagctgggcgtggtgttgtgcgcctgtagtcacagctacttgggaggctgagataggagaattgcttgtacccagaaggtggagattgcaattctcgaaccgggaaggtggaggttgcagtgagccgagatcatgccactgcactttcggcttgggcgacagaaggagactctgtctcaaagaaaaaaaaaaacctctacaagatacagtatgcaggtggaaaaagcaagggaaagtgtgtttagtatgttactatttgtgtaaaaaattagtggaggatcaaaatatatatctgtgccaatatgtgaaaaaatgtttctgggctgggcacagtggctcacgcctgtaatcccagcactttgggaggccggggccaagtgatggcttgagaccaggagttcgagaccagcctgggcaacatggcaaaaccctgtctctgcaaaaatacaaaaaaattagccgggtatggtggcgtgctcctgtagtcacagtgggaggctgaggtgggaggatcacctgagcccaggaagtcgaggctgcagtgagctatgatcaggccactgcactccagcctgggcaacagagtgagaccctctctcaaaaaataaaaaataaataaataaataaataaaagagcgagtgaagacatttctggaagcacatggagaatgtgaggaagggacttgaacggctatggctaggggcaggagctgaggacacatcgtgggggaaggcgtgagtgggaggctggaggctttggtcttgaaccaaacaagatggcgattctaagctccagagagcccatacaagctctgaatccagtacctaagggttggaagtgtagctgtttttctggtgagtagggtagaggatggaggacattggggaaagtggccccccggcgagagaggtcgtgtgcactgagcgggagcagcttgagctggggctggctctcaggtcgcatcctgtggccaccagggggcagtgaagcccactccgaaaagcgggcggggcggggcggggcggggcgcctggggcatgtcccacctccaggcctgccctccagctggagctcctgaccgcttttcccagacccctcctggaccgctggacgcggccacgcgggactccgagagtgcagcacctcctctcttctcctggagagcccgggggaatgccgagtccatccccgcggtcaccctcaacatccagtcctcctccactgcttctaggttatctcattcaattgcccatcacacccattttgtagaggggaaagctggggcacagagagagtaggtaactcactcactggaagccacggctcgagaaatgacgacccgggacacaaatctggctgtccatcctcaaaaccggagcattcatgaaaccatggcttcctcactgatctccttgtttccactctgcttcccctccggaaccttctccacccatcagccagagttttgggggctctcgggctgtatcactccctaacttaccacctttctctggctgtcactgccctcaggatcaagttcagtcctctcaccccaccctctgtcatcatcttaaacccagcagcgccctctctcttagctctggacacaccagcttttcagcctgaagacaatgcctgctcatctggtgcatttactgcttcttccccaggcccactctcctgcctccccacttaattttaagttaaccgtgatgcactcttcaggccctggctctcatgtcaattcctccagggagccctccctgactcctgattcccagacgagctcagatcgcacttactatgagtctcttgggttgcactggcttcaaacatgcacttcatttttgtatctataatggcatcactattctaaaaatctgtcatccttgagtctctctgaagctatctctactccatctgaaatcctgtgggatgtgccttaaaaatctgaagtctgaccccttcttacctccttctctactaagtccttcatgtcttggtagaagaccaaaccgcttcctcatggtcgttgctttttcctcctttgcccttactggggcttagaaaacaataccccaaagtatggcactttggcataccgaatactttgaactaaaggaggctgaaaggcctcagaaacaagatctctgactttctcctgccttgctgtctcccatttctctttctcccctgaagcaagtaacagaaactagcattcattcctcttccccaaggtgggtcatagaaactagaactcctctccccaaagcaactcataaaacacagaaatatatatatatatatacacacacacatatatatacatatatatacacatatatacatatatatacacatatatatacacatatatatacacacacatacacacacacacacacacacacacatatatatatatatacacacacacacatatatatatatatattttttttttttgagacggagtcttgctctgtcgcccaggctggagtgcagtggcgcgatttcggctcactgcaagctccgcctcccgggttcacgccattctcctgcctcagcctcccgagtagctgggactacaggcgcccaccaccacgcccggctaatttttttttgtatttttagtagagacggggtttcactgtgtttgccaggatggtcttgatctcctgacctcgtgatccgctaaaacacagaaatattactgtaaccttcctctgctctactgtgtagaagctggccacaaattctcggctgggcatggggatcactggaggctaggtgttcgagaccagcctgggcaacataacaagatccccatctctacaaaaaaaaatttgaaaattagccaggcttggtggcactcacatgtaatttcagctgctcaagagactgaggcaggaggatcacttgagcccaggaatttgaagctgcagttatctatcacactactgcattccagcctgggtgacggggcaagaccctcttaaaaaacaaataaatactctgacctatgtcttgtctcctgtacaggagaggaaggaatgctacacagaggccaagaagaatctggactggccttgctgggttggctaatttaaaaatttttttgtagagacagggtctcactttgttgcccaggctgatcttgaactcctgaccttaagcaacccatcccccacccgcaaagtattgagattacagggtgtgaactgccactttgtttttcttttgttataggaatgtcagtcacagaaccttctgatgggtgaggaaaggcatcacacctttcccccacaccctacagcagctagagccgtgcttatgtctgtctcttccactagaatgaatgcttgtaaaggcaaaggttttgtttgaagaagtccccagtgcccaggactatgtctgtgtagagcagagctcagtaaacacttgccaagtggctgtgtctcccactagaatgtcagctcctgagggcagagactgtgtctgtcctgttcacatgcagccccagtgcccagcacacagcatgtacccagtaaaaccctgtcaccgtacaggtggataaattcaggcccagaaggaaggaaggacttgtccaaggccctcccctgagggcagcagagccaggaccagtacccagctctccagcggcccctcctttccccatcccggagcacacaagagcccaggctctttgttcactgagtaaacacagtttattactgaactgcactttcaccttcacacagactatttcaaagagctggaacaagtgtggggtgggggttgggggaggggcagatgcccctcaggagccaggaccctcggccagcttccctggaccagggcaggggagggagcatcaggccgtccaatctccgggcaccagctctccacgtgcacgcgcactgcaagccagcagctcctcacacataaatacagacacgcttaacaaaaatagtatatcatcttcacaaggaataaaaactagtctcaaatatgtacagcagagagcccggggtggctgggacccctggggatgagacaggccaagggtggagcagaagagagagggaggcctgaagagctcctggccaggccactctggccttggcagcctggctgcccaggctggacaggcatggggcacagatctgcctggccaggcaggactggcccttctagtcagccctaccccaccccatgcagcaggctctccttcctgcccttcctgcctgaggtagggaagaccctggggctcccatagctgttcctgatagctccctttcacctcagggctgagtcccctgaacccaccatgaggagcagcccaaggcaaagatgccacaggctgctcttgtaggaagtgaggcagctgaggccataaacagctctggggcatctgtcttgggcccagttggtccctcagtatggtcatgggagccagggaggggaagggactagggtggtgctgaactgcaagggccaccctagctttggcatggggtgcttcctgtagctatagccccctccctcctgggtggggctggcctctagccagaggcttctggaggacatttggactgggagtgaggactctagccagtccagaggtgaggagggagtcctggtccttgcatctttatcccaagcagcctgaatccctagtcaaaagtggcccctaaatggctcttagggggtagggatggaaggaaagggaacccaggttagtgtggggagagtggggggaaaatgatcaattctgaggccacaaacatcaaaacaaaggcaatctagtctcctttctggggaagaggttctgaaaactttcaagctccctggcagaaaaacattttcagggaggctaaggggtaagggttgcaccaatcaggtagggccctcctgcccccagccacaaacccttccatacctgccagcctcctttggacagattttgtggaaattttgtgaattctgaggccaagggaactgaggtgtgggggtctcacagaagtgtgataaattctagaaaactagctgcaagggaccagatctgggcccaaccctgtgatgggcaggtgggcatgggctgcatgtagtggttctcctggtggcaatggcggctggacggaggatgtggtggagcagagaagggggtgggagggtagagtggatggtcagtgtctggtcatttccgactgaagagtgagcccagcagaaccacgccggccacagtcatgcccgtcaggaaccagcggttgaagcgttcctggccctttcggctctcggctgctgcattgttcccatagagttccacaaaagtatcctgcagggagagagaaggaaggtgcagttttagtcctcagagagtgatgtaggtgggtggggaaaggggccatctgcatgctatggccttggtgatgtgaaaaactgtagccatctgtgcccactctgggccaggtaaagggctaagggtggtcctctttcttgaccctccattggtgataatcaaaccatgttactgctgagaaacaggtagagaggaggaaagtgccctgtctgaggtaagtcaagaagtagcacttactccagaatccaaggtgggaacgagatgggcagggtcagggaactgatggaagccaggtggctggagcagagtgcaggagaggagggcatgggggagatgatggtgcaggggtgagcaagagccagaccatacgtggcctggaagccgcaaggagcctagagttgagtctgagggtagtgtggagtgtggagccactaggcctcagattttctactgctgcaccagagggagggataaggaagcccagggctaaatccccagggtcatttgaggccaattcaggggtagaatgggtcctgggacttcagccagaggctcctccctctggagggagcctctggtgggcaggttggtgacaagaagagcagggcagaggagagagggtaacaatgatgcaggactgacaggcctccatcacggggtctgtgaggccttgtcccggacatcctccactgcagggggtgtgactctgggcccaggaggttgtgatcaacagccctctgccctgaatctaagtcagaagggaagcacatgacagggggaaggaggagctgtgggctaaattacccagcccagggtgcagcagcctgtggggcagggagaaggacgcttagaacataacttttatgagtaagcgtagtacccaatttgtcctttaatcctcccaacaattctgcaatgcaggctgtctctccccatttacaggccaagaagctgtgcctctgagggtccagggactggatcaaggtcacccagctgtgtcagtggtggagccagaatctaaaactggcatctggcacctagaaatatgtaagaaagaagtaagttccaggctgggtgcggtggctcatgcctataatcccagcactttgggaggctgaggtgggtggattgcctgaggtcaggagttcgagaccagcctggccaacatggtgaaaccctgtctctactaaaaatacaaaaattagccgggtgtggtggcacgcacctgtaatcccagttactcaggaggctgaggcacgagaattgtttgaacccgggagacggaggttgcagtgagcagaaatcgcaccacagcactccagtctgggtgacagagactccgttcaaaaaaaaaaaaggaagtaccatagtaccgtgtgtgtgtgtgtgtgtgtgtgtgtgtgtaaaatgaatgagttactggctggttcttgcctctctaccaagacctctgccacactgggcctacatttccaaccagtcccaaatggccgagtggctgctccctcaagacaggcatgccatctccagttggcctcaggtctcacctatcaatttgctcacttgtgacccctgccgtggcccacttccagtcttgacaaccccctcagtccatgctccacacagagctttctaagaacactggaagccctccagcagcattctcctgcacttagaagggcagcatcatttatttttgtatccctggtacctagcaaaatgccatgtgcactgagctgctaatttgactgaaggaatcctcaacattaaggcagtagagagcagtgacccatgaatctcagcccttgcagaagcacactccattcagtcactccaagttctcaaccttcccagggcttccatcacacctgaaataaagtccccactccttactctggccagcaaggtctagtgggatctggctccaacactttctggcctcctccccacccctgtcccctgaacttcactccagtcccactggcctccttgctgttcctccaacgtctcctgccgcaggagtctgctgttcctgcttgcctggagcacctgaccccaggtcgtcgcctgcctcactccctcatttcacaaccatgactcccctcaaatgtcacctcctaggggaggccttccctgactgccttgtctaaaacagtacaccacccccgtctctctctgcctgtccccttaccttccttgatttttcttctcagttttttttttttttgagacacagttttattctgtcccccaggctggagtgcagtggcacaaactgggctcacagcaacctttgcttcctgggtacaagcgattctcctgagtagctgggattacagacatgtgccaccatgcccagctaatttttatatttttagtagagataaggttttgccatattggccaggctggtctcaaactcctgacctcaagtgatccgcccacggcctcccaaagtgctgggattacaggcacgagccaccatatctggcctttttttttttttttttggagacagagttttacccttgttgcccaggctggagtacaatggcgcgatctcagctcactgcaacctccgcctcccaggttcaagcgattctcctgcctcagcctcccaagtagctgggattacaggcgcgtgccaccacacctggctaattttgtatttttagtagagacggggtttctccacgttgggtcaggctggtttcaaactcctgacctcaggtgatctgctcacctcggcctcccaaagtgctgggattacaggcatgagccaccatgcccagccaccattttttttttcttgtttttaaaagatgtgcccagactgactttgaactcctggactcaagcaatcttcctgcctcagcctcctgattacaggaactacactacacagaatgaccaccatgccagcttttcttctcagtgctttattttttaatttttaaatttttgtgacagtgtctcactctgttactcaggttagactgtagtggcgcaatcatggctcactgcagccttgacctcctgggctcagatgatcctcctgccccagcctcctgagtagctgccacactacaggcacacaccaccatgcctggctaatatttctaaattttttgtagagacagggtctcactttgttgcctaggctggtctcaaactcctgggctcaagggatccttctgcctcagcctcccaagtgctgagattacaggcgtgagccaccatgcccggcctcaccacctcaccacatttttcccccattaagctgtacttctcataactagattctgtactttgtttttgttgtgatgtgtcttccatactagatgtgtctttttttttttttagacgaagacttgctctgtcacctaggctggagtgcagtggtgcaatcttggctcactgcaacctccgcctcccgggttcaagccattctcctgcctcagccccccgagtagcgcctgccaccacgcctagctaatttttgtatttttagtagagatggggtttcaccatgttaaccaggctggtctcaaactcctgacctcaagtgatctgccctcttcagccccaaagtgctgggattataggcgtgagccactgccctcggcctatactagatgtgtcttgatgagggcagaggtcctgtctcgttcctatacacccagtgctcagaacagtgtcttgctctgtaaatacatgagaatacatgagttaacaaatgtattgcatgtctactacatgtcaggcattggtatcccatttcatcttcatcagaatcctgagatgtagatttgagccacatttcacaaataagatgcctgatatttaaagcagggaacactcagcaaacagatagcagagtcgggatcaaactgcaagactgcctagcttcaaagggagggctgctatgtcaggacacttccctgaagttggaggctggagggacctgtcctgtcagtagtgctgaaaggatggatttccaggagaaggaatgtgggagcagggttgaggtggaggatctggggaaaggagggcactagggccgtggctatgcttccctgtctccctctccatcctagctagcctctgcgggtcttggcagacaaaaatattcttacaggaggtttgattttgttgctcccaagtacacccaggtggagtcacaaaataggcttatctgtgatgggggagagttccacactatgaagagcataggagaaggccctggttatcccaagaggccaaatgtctctcaagaaaccagggacactggggttgcagccaaaatgggagaggcctggctcccttgatgggaactttcctgaagtagacggctggcagccacaggaaattttcagctctggggctgggttggagtaaacaggcgctgtccccacaagggcacaaagcattcactgtccagaaacagtcattcctgggtggagggaacattctcatttcagtgccatagaaacattctcatttcacctgccccagcttccactcatgtgttcctggtcatgacaaccttcatttccatttcagcttcttttcctggggaaggggagtagtatttccaaggggtgtggattctaaggattgcttttgcggagacagcatgagcaaaatggggcgtgctgttccagggcgggtgctggagaggcggtggcgtgggtatatttagcccatggttcacacgacacacttggaaataaacagagccattttctcagcaggcggctgctctggataaataaacaggattgcagagcagccctggtctggaaaagcagagataagcccctactgcaccttgggtggctcccactggttttaaccaggctggcatggtaggcaggggatgaggtttaagagtgggttgtagggaggtctctgatgtcacaaaggtttctaggagacccaggcccaagggcctgtctgcatcctctgcttgagttaagaggaaagtggggtagctgacttccatgtgggggtttgtagggccactggcgacaggcaatggctaatgacctccacaggagagtcatggattcctagccaggtaggcccatgaagtcagcaaggccaacccacctgcccattctacgtttccactgctggtttgtagtagagcctacactagaaaactgggtctcctgacttggcccctaggagatgcccaggctagtatcactttcaaggtccttcttccaatacttcaagaggcttcaacagtcctggccacccacttggaatggccccacactacatactcctgagtgcttcaggccctggtgcctttgccaacactgtcctttaactggtcactccatatcttcctcagttaaccaacccctactaagcctataggactccattttggagtcccctcttccctgctcatccctccccaacctctgggatgaatgtctcctttctgttcccagactccttggacttctgtttataccaggggtatgcactgaggctggcattggagactcagccgtgagcaaggcttccatggagcttatgttctagtccattctcaatggtggtaagatcacctccaatggcgtgaagtgaagcattcttagacattacagtgatttgtggctctccacagggccacagcacataaggagatatagagtatatagtatatatagtatataggtattgccctcccatgaaatttgaatacctcagctatactatactatatataccatatatatacacacaatatgtagtatatatagtactgtatatactatatatatactttacatatactatatattatatattatacatatctatatctatatatactatatatagtatagtatagctgaggtattcaaatttcatgggagggcaattaggacaaaaaaatctgaaaaagactccttgcaggggtggatgataaaaaaaaaaggttgagaaaccctgtcttactgggaagcagagaggataacaagaaaaaaaaaagataattttagagatgatagggttttaagtcctggggaggtgacagagaatatctgggggagccgggcacaatgactcatacctgtaatcccagcactttgggaggccgaggcaggcagatcacctgaggtcaggagttcaagaccagcctgaccaacatggtgaaaccctgtctctaccaaaaatacaaaattagctgggtgtggtggcaggcatctgtaatcccagctacctgggaggctgaggcaggaggactgcttgaacccaggagatggaggttgcagtgagccaagatcacattattgtactccagtctgggcaacaagagcaaaaccctgtctcaaaaaaaaaaaaaagcctgttttagcagaggtaataagtgcaaaggccctgaggtgggagggagaggaggggtgttcctgggttgatggcctctgtgtgcctggtttcccccaacagtctgggggctcagtgcaggcagggaccaagtctggcccaggacctactcagacaggcacagactgacttcagctagatctctgcccagaggcagccaactgaacgatgcaggtcaccttgtaggtgcctgtgaccctgtagaagtcaggtgaaaaggttggcatgatgccctgaggaaaggggcccaagtgccagaggaccagccagaggctgaagtatagtccctacttgaatctgatcttttagttcccatcctggcttcactgcccacatttccttctttttttttttcttgtaaatttttggagagatggagtctcactacattgcccagggtggtttcaaactcctggcctcatcctcctaccttggtcttccaaagtactgggattataggcatgagcaactgtgcccacccttcccacttcttccaagtagtgtgactttgagcaggttacttcacctctctggtccatggtgtccttgctttttttttttttttttttttgagatagcctctcactctgttgcccaggctggagtgcagtggcatgatcttggctcactgcaacctcagcctcccaggttcaagcaattcttctgccttagtctcccaagttgcctgggattacaggcacccgccaccacacctggctaattttttgtaattttagtagaggtggggttccactatgttggccaggctggtctggaactcctgacctcaggtgatccaccttccttggcctcccaaagtgctaggattaaagacatgagccaccgcacccagcccttacttgttaacagtaataaaatactttaggagctgaggcaggaggattgcttgagcccaggagtctgagaccagcctgggcaacacaggaggaccctgtctctacaaaaaaattaaaaaaaaaaaaaaaattagctgggtgtggtggtatgcatctatggtctcagcaactcaggatgctgaggaggatctttgagcctgggaggtcagggctgcattgaatcatgtttggggccactgtactccagcctgggcaacagagtgagaccctgtctcaaaaaaacaaaagataaaagcaaagaaacaaaaaactattattatgacagctgaccattaccaaacatttcagtgtttcacctgtgctgggcactgagctataaagcagtctatgcacactaggccatatttcccaattacatgtacaatcatcatattcacttgagagattattttttgtcctgtctcccccacttgactgtgtgtggctctgtcacctgtatctctagaacctggtgtgctatacttggaacacagcagatgccattctaaataaatctattttagaagaacaaatgaatgctttcatttgatcctcataacatttatcaatagccccattttacatatgtgaaaatggaggctccagaatttacccaagatccctatctaggaagtggcaagagtaggatctgtctgagttctggcctcacaccattctttttcttttaatctatccaagatagtacttcattcacactcattctgatgtccaatcttgccatcttagaccctgctatctctacccacagaaaacctgacttccttagtgacttcagcagcagcgcacacttcctgagcacatactctgtaaggtactcttcttggtttttttgtagattagttcattagttgtctctacactctgtcagtgggtactaccattaacccatatagctgatggatatgtggcccacagatgatctgtgaattgctcaaggccatgtagtgagctggtgacctaactgggatgcctacaccagcaatctggttcagtgcctttactcctaacgttgatgcagtactctgctcagtttctaaaggacaatcatgggccaggtccatgtacttctgtggctgaggaaggccttcattctaagtccaggtaacctgaggctcagagatactgagacctagctaaagtggataagtggcagctagctgtgatggctcacacctgtaatcccagcatctttgagagttcaaggtgggcagactgtttgagctcaggagttcgagaccagccagggcaatatggtgggacccccatctctataagaaaaatcttagaaatttagctgagtgtgttggcatgcacctatagtcccagctactcaggagactgaagtgggagaattgcttgaggctgggaggttgaaactgcagtgagctgtgacagcaccactgcactccagccagggcgacagaatgagaccccgtctcaaaaaaaaaaaaaaaaaaagggaagccatttttaagccccagtatgtttggcagcaaaccccatattctgagccagggccatggccctgggtctgtcaaggagggtaaagtagcctgaggccatcagctgaatgaataagcactggctcctgccagctgaggggaactggtgccacaggaaaaggatgtgacgaagaccaggagggaaagtgaaacccttccgtcctggcttcagtgaggaacaagcatgcctgtgccagacgaacccttccttcctcttgggtgactctggagggcccaggcccattgcttccttcctgcttggttatttcaggaaagaggtaggtggagaagaggaagaggctactagcagccaggaaaagtgccagggacaccagaactgtaccttgttctgtccttctcacatccctgcattggcaggctgtgagtcacctgcagagtcaccttatgctcctggcctcagtttccctgagggagaggctgataaatgtgtgctgaatagacaaacatggccttgctagaagatcgctgggagatggtaggaagggggtagggcaaacggagaggccttatcactcttttggcagggagttgcaggcggagactcggaagaagtgaggtttgtggttggaatccacttcctctggttttcccaggggagctgttggctcccgagatgtgagaagaacatggcctttctcctctcccccacggaaacataggcctggaggtgggcaacttggagaagcagctcagtggaggcagggcaaagagaggggtggcaagactgtgttggggtcaacacctcagtccagccggcccaggtatgggtgggtgccacagcaagccttttggcttctgagcctcagtttctcctgccttgacctccctagcagtagtggtgagatcagggggtgtcatagagggctcaagccatctgggctatagggaatatttggtggtatcctcacaacaaacttcatgtttatcttcctccaactctgacctgttcaattcagctgccagcctctcctcctccacctcctcccccaccattagttctaagaagctgtgcctgacagatgcacttgcatttctcagaaaaggaagcggttgtgccgggaggagataacacctccgctggggaatcgagaaagctatcaggcctagcagtgcgagtgtgggctctccatctctctggctcagaaccagggtgatgggcttgggggcaaagagagagaattcagaaaagcatttactgggggcagagatgctcatttgggggctcataacctccttccctggaaccgatggagataaaacagctgatgtttactaagtaccaggcatggtgctaagtgcttcgtgtgtaaagaatttgcttaatcctcacaataatcccaccgagtacatgctgttattactctccagcttacagatgaggaaacagaggcagagaggataaatcaccctcccaaggtcacagaggccacaagtggtagagttgggatttgaatacaggcagtctgtctccagagtccaaacatttaactgttcctgggtggctgctatgtgctcatataggctcatcccctgggattccgatgcctcccgtcatctcaactctctcatttcaaccctggtgactccctattctttcgtaagtagatggccacagccctccattcttctcccagtgtccagggtgagaaaaaccaatactcacccttggaacagagtcggagactccagggaccttacagcatgcccatccaaccttccatgtaatactcaagctcaccacgaacacccccatttcacagacagggttcagaagggtggagtgctgaagtcccacagtgggtctgtttcattctgatggtccacacccatgggagttggtagtcatctcgagggcattctctccttatgcacttatggagagctccctccttcctgggtgggacatttcatcttcggacagccccgttggaaaactcttccctgtcagggagctgatgctcgtctccctctgtctcccttgactggctggtcttagttctgctctctctccgctgctgctctcctgctctcctccaagtatcagttgtctcatttgtgaaatggaagtgctatctggataaaggcaattaatttctacttctctaccaagctgggctgccagagcacagagcaggcagagaaccaataagtcttgcaaactagattaagatattttgcttttgacctcatctgtaaaatgcggattaaaaaaatccttatttaatttttttttttttttttgagacagagtctcactctgtcgcccaggctggagtgcagtggcacaatcttggctcactgcaacctctgcctcccacgttcaagtgattcttctgcctcagcctcccaagtaattgggactacaggcatgcaccaccatgcctggctaatttttttgtatttttagtagagactggatttcaccatgttggtcaggctggtctcaaactcctgacctcaaatgatccacccacctcggccccccaaagtgctgagattacaggcgtcagccactgcatctggcccaaaatgtccttatttcaaaagaataccatgaggattcaaattaatacatgtaaaggtcttagaattgtgcatggcacatagttaactttgagtaaatgtctggtttattgttcttactagtagaccatggctcagcttgtgtctcggagccttctctatggcttacaagggcctgcagggttttctcagcttcacctagggccaggctgcttcattcctcacatgccatgttctgttcagactcaggacctttgcccacactggtgcttctaccaagctctgtcccacttatctctgaggtcttaatccacaggtcactttctcaaggagcctagctgctcacttcttcccccatctgaccatgggctctgtcccctaggccttgcccagtgctgggtccagagaaggtgctgaagagtctggctgagtgttggacagagaggagggaagagaagaaaggccagttcccactctcttcatccctttcctcactgcctggcaaaactagaaagaggccccaatatagcaggtgattatgcaaggtgtccagtattctccagacactttctctcaggataaggaaaggggacaggaagcttatgggaaagttctagaaaaggcatcttttgcactgtgctgaggcaacaggcaggaatggggtagcaatctccaaaaactaggacttctttctgaggtctttgaccccaagtgctccatagtccaaagcagcttctccttcctcctctccacccaaagctatggcgactcccttgtctgatgcagatcagtgctggatgctgtggggaagagagtactgggctgacagtcagtggatgtggattttgtttcccagttccatcgctgatttgcaggtgagtcctttcccctgcctgagactctgggaaagtatgggcctttccccaactgtcaaatgaagtgggaatcatctcaaagggctccgtctagggctacagcataaggagaatgaaagtaactcatgcagacagatgagtgactaccagggttctctctctcaggggtatccaaaagatccagtaattagtgtgtaaattgagaagcaacattctgaagtaggagaacttgttgccacaaaggagtctgatccttctccacctcaaagcccgctgggcattgctctgaacctgcaggattccaggggaagagagcaataggcacatctatgaccaggcagactcctgggcaaggctagatctttccacgctctagctcctgtggcctcgacctcttcaccccagcaccgcctccaactagtccagacaagtcccaagtattttcagccacctttatctgatcagaaatgtttggaattccacagcagaaggcaacagctctggaggatttggggaagggagcaaatccctgcaacacccttctctccccactgtacagatgaatgctcacaccccatgtaaccaaaaactcagggctgaaggcacccacggtgttgcatttccttctattctgtgatgtgatggaactgggaaacaaaacccacatccactgactgtcagcctcatactcttctctgcagcatccaacattgatctgcaccagacaagggagtgggttccttcttgttttctaccctattcatttctgccccagtccattacccctttaaggtgcagaacagtaagatgcctgagatggtgagaagagggctagggtactttgcctgatgtcgagggagggggcacccagaggtgtgctgttcacagtcaatacccagagcaccaccaccaggaggcctggaagcaactcactgtcccacttgatgtggcctgtggaccaccagaaatttcagagcgtcacagagatgtgtggttcgatcctgagcaggtaagaaactgaggcccagaggaagtgaagggatacctccaaggcttcatacagggacagagcacagcctggtctcaggcctccctaccctggagtgagacagtgtggcttccaaccctagttctgtgactacctggttgcaggacctggagcaagacactttccccctccaagcctggtgttccggctgcaaaatgaaaacagctgtacttacttcacaggcctagcagcagagttcaatggtccatggtaagcgttctgtaaatgttagctgctgctgctgctgttgttattattatcgttattaattgagacgaagtctcactctgtctctgtcgcccaggctggagtgcagtggtgtgatctctgctcactgcaacctctgcctcctgggttcaagcgattcttgtgcctcagcctcctgagtagctgggattataggcatgtgccaccacactaatttttgtatttttgcaggctaatttttgtatttttagtggaaatggggtttcgctatgttggccaggctggtctcgtactcctggcctcaagtgatctgcctgcctcagcctcccaaagtgctgggattataggcatgagccactgcacccagcctgtttttttatagctaaaaaatcagtggctccatttgtgcttctcatagtgtctctcttatttgtagctataaacaaacaaaaagtaacagctagtatttgctgaactaatatttactgtttgaattctcaaaatcttgcaagtaggtgctgttcccattttaccaatgaggaaactaaaattcagcgaagtgatgagactttgcctgaggcccctggttactagtgagggcattcaacttcacagcatgttaaatttaccagtgcaacaggatacatgaagagattttactaagaccttctttccttcaccctttcacctacccaatatttactgagaatctgctattcttaggccttcgaagtcagagatgactttaagtacatggaagtagcattcccccctggttccctgggtgccttgaggggtgagaaagggaagagtgtgctgaggctactcagtgatgaacccactttcccctaagccagatctgcaaggacagtacttgcagagagagttcctccctctgtctgatctttatcttggaaacaaaagtgatgccacgtagctttggtgaagctattagatgagttttctaagatgggacatgacctatttgtaagccaggctgacctatggagttgtaggaaggcccagacaggctgccttccctagctttggacactcagtcattcaacaaatcttcattaagtgcccactaagagtcaggcactgtactaagcgctggggataaagcagtgactaaatagaatgaaaattcgtacctgtatgagtttataatcaaatgggaagagacaggcaataaacatgtcagacggtgatgcattaagaaagaataaatgtgagaaagggggtacagagaaacatggaagaaggtaagattagaatccatggtcagggacaacttcttaaggaggtgaatttgatcagagacctgaatgaaatgaggaaacaggcactgcaaagatctgagaaaaggctgtgggaacaagtgcaaaggcccagaggcaggaacacgcttgaggtgctccaggaacaggaaaaatgccagtgtggctgaagtccagtgaatgtgaggagactggtggtgatgagatctggaggtagccaagggcccgattgtgtggggcctggtaggccatttaaagacttgggcttgtcctgggaaagcactgtagggttttgagcaggggaaggacatgacctgaccttggtgttaaatagcgtccgtctggctgctgggtggagatctccaggggtctggtgagataatcaggaaaatatgacagtggcttagccacaatggtgccagggaagttggtgagaagcagtcagtttcagaatttattttttaaagtaaggctgggccaggtgtagcggctcatgtctacaatcccagcacttgggaggccgaggtgagaggactgcttgagtccaaaagtttcagaccagtctgggcaacatgggaaaatcctatttttacaaaaaaatgacacaaagtagccaggcgtgatggcatgttccagctattccggaggctgaggtgggaggactgctggagcccaggaggctgaggctgcagtgagccatgactgcgccactgcacttcagcctggaagacacagcaagatactgttcttaatcaatcaatcaatcaataaaagtagagctgaaaggatttgctgatgaattagatgtggactgtgggagttgcctgccctcttggccctctgtttcccatctataaaaggcgagagaagaggcccttggggatttctttccagtttgataactatgaggacctatatgaagaaagagataaagcaactatttctgctgctctcatggaagcaaaatcatttgctcaccaggcctcaaagtgtggatggcaataagatgaggaaggcagagatggacagagacagtgcagcaaagggagggcagggctctgcctaggctgtggctattccactttcagcacacacattaccgccaggcatatgccaggccacagagtagacaggctccagtgggagcgggggtcagggtagcttgctttatattaggagagaagaagcatcagagctgccgttgtccagggcctactaggcagaaggtgctcagtgactgactgactgactgagtgaatgaatgaataaataaataaggtaatgccagaaggccagtatatgtgcaagaacttcccaagtccttccaaattaacaggaggtaggcctggtccaaaggattgctctcctgtcactttatctgcttattctaggctgagcttcaagttcttgttctctgtgaatgggagactatgtggtctgaatcactgaagcaggattttagagctggaaggcagcacagacacatttggtccactctatccacaatttcagccatcactgctttgaccttatatgtgattctgttattatttacttaacatttttcttttcaagacagggtctcactctgttgcccaggctagagtgcaatcgtgtgatcaaggctcactgaggcctcaacctcccaggctcaagcaatcctcctgcctcagcctcccgactaggtgggactacaggtgtgcatcaccatgcctggctaatttttttttctttttctttttttgtagagataaggtctcactatgttgcccagtctggtcctgaactactgagctcaagctattctctcgccttggccccccaaagtgctgggattatagctgtgagccactgtgcctggcctacttaacattattctatcaatttacttactttttataaatttaaatacatgtactgaaaattctcaatttattccctaaacctgttctttctgcatctttctcatccttaaatcccctctaacactcatctgtcaatatatcctgatgaatctgtattccaaatttatctagagtcccaccatttcccaccacctccactgctattatttggtccaagccagtatcatttcttgcctgtattgtcctaacagcctccttactggtctcccagcttcttatcgactccatggttccttcaccacatggcagccagaggggtcagcaaagtcagtttcctgtctgctcaaaaccctccactgccttcccatctcacccagaggaagaaccaaaatgtctcaccactgctcacacaaactttcctttccaatcacttctcctctgcttactctgttctagccacactgatctcccgtgctcttcctcaaacatgccaggcacaccattcccaccctttggcctctgcacttgttccttatgtctggaatgttttttccatagactgttacatggtttcctccctcagacagatcatgcagatctctgctcatatgcctgctcctcagaggccttccttaattatcctttattaaaaaggcaaacacataccaaaagctgcctaccaccggccacctaatcactctctgtcctcttagaatgtaaacttcatgatggcccggcgcagtggctcacgcctgtaatcccagcactctgggagaacgaggcaggtggatcacctgagatcaggagttcaagaccagcctggccaacacagtgaaaccccgtctctactaaaaatacaaaaattagctgggtgtggtggcgggcacctgtaatcccagctactcaagaggctgaggcaaaagaatcgcttgaacccgggagtcagaggttgcagtgagccgaggctgcgccactgcactccagcctgggcaacaagagtgaaactccatctcaaaaaaaaaaaaaaaaaaaaaaaaaaaaaaaaaaaaaagaatgtgaacttcatgaaggcaggtatccccagtagctagaatagtggttgacagatagtagacacttagcaaatatttgctaaataaataaatgcaatgaaaaggcaacttattattcttcctataaagagtatcatttgccccagatggaaatcaacataaaatacactgactattaaaacagaaaatgtccatctgcatatcacctctaagttaccttgaagatcctggtctaacacctttacagaggagatatttgagacccagggcagagtcagccagctgaccggaagccagtccagaatggcccacaggtaccccccaacatgccttggaaccacagccctgtcccccagggtgtggacaaagagactgaatctcaggaaaggtatagctaggttggaccaaaagaacctatctgaggggccagaaaagccctccctagcaaggcatagagctagcagttttcctgaagagaacaaaggccaaagaggcatgagtgtgccaggctgggagagcctcatggggctgcaccgtgggtgacaggcacgtacaaacctgtaagtgaggtccacagagaccagagagctgagagcagaaatgaaaacaggataggtcccaaagggtggcagcttcaatccgtaaacaccagacaggcgtggggttcaggtgtaggtctggggacccagctgagcccaggggaaggatgggacctccccagtctcctccgtcagtgatgattactctaaggtgagctgagcagaagcaccaccaatccagctatagtaacaccagacatcagacattaaggagggaagagccagatctacccttctcatctccacattccggatggtctgtctcctcccaaacccactccacccatatgagccctcggggatccaaaccctattaagaagggaccatccatttcccatctttgaggggcttagtgaacacggctacaggtgcaggggtgaagctagagatgttgtaactgccaagccagcaatgcctgacctacatctccacggttggttgcatacaaagaaaaataccagggatttccgttggtgttcaccacatgcagctgccaagggaaggctgggccttctgaaggcctgttgtgaatagggcaagacaagtgataagcttgctgggataggcgagaaggctggcctctaaatttactggctctggggacctccctagattttagagactctatataatttttacctgctttctaccaaggtcctccattaaagctttttcttcttctagtatatttttattaagaattgagaaagacagccaggcgtggtggctcacgcctgtaatcccagcactttgggaagccgaggtgggtggatcacgaagtcaggagatcaagaccatcctggctaacacggtgaaaccccgtctactaaaaatacaaaaaattagccaggcgtggtggcgggtgtctgtagtcccacctactcgggaggcttaggcaggagaatggcgtgaacccaggaggcggagcttgcagtgagctgagatcgtgccactgcactccagcctgagtgacagagcaagactccatctcaaaaaaaaaaaaagaattgagaaagagagaaaaagaagattctatttggaaaaatgttccccaaactaaacagctgttcttattgtaaaccactggtattttcagtgaggctctagttccgcacagaaaaaaggcaatttgaaagttccacatggtcaggttcaagaaacgtgagcttactcctgctttgtggtggctctatttggctatggtcctgtcaattaagcaccacgggcctcacttttctcatctgaaaagtgtggaggatggatcagatgatctctaaggctttctctccagttccaaagcactaagatcctatctccgggccctttttttttcccctcaagggagcagtggagtgtaagggaaaagtaagctttcttggcagacaaaagactgagttctaatctcagcaatgccatttattaacttactgtgtaacaatggcaacccacttcccctctgggggcacctcattttcttcatatataaaccaaagacccaaaagtgcagtgaacaggtactctaggaggcctttggcattattattatgcctcccttacattgttcacccattagcatatcctggcctcccaaagaacctgttctttacttgacattgctctgacttgcaaacccctgtccttgaaaattaacacgttccaagagctatgccataggagcccaaatagcctctgggtccccaacccccttctgatgtcaataaaaagatcactgctatttattcaatgttttgtatatgccaggccctcatgtgtgtttaaaattcttattttatgaagacatggatggtcacaaaggtgaattcacttgctcaagatccaacacacacaaaatggaggtggttcaaacccaggtgtgtctgactgcagagcctgtgttcttcccagtagagatgtggatgcagcacaaatggtagaaaggacctgagacttagtcagaagacctcagttcacccaaggtaagaggaaaaccctatttacctcctcctagcatcgtcagaggttcaatgagataatgtgtgaacacaaggaagcactagacaaactttagttaatgatcctatgctattattttatgactccagcctgggtttcaccacatttgcaaagagagtggaagtagcaagctgtaatatcttagagatgttacagccccacttctctgttttgtgtcctactcaggctttcttttgttcacatctggtccatccttctagattcctgttacttggaccctccaggccacccagcatgatacccacagtgttctccctgaaaggccatggagcggagggagtaaggggtaaatggaaaccacaagtcttctctaaaacagtgtgaagtagataatccagacttaccttccagaaagggcctcaagcaataagaaaaaataaaaaaaggcagagagagccaagggaagcccatggagaccatagttaagtgagggcttttgagtccaatatattggacttgtattctgtctttattagcattcaaccttaggactataatttaacttactttacactcagttttctaatctggacaatgaggacaataacatgtttcccaagaaggattattgtgaagattaaaaatactacactggccgagtctggtggctcacacctgtaatcccagaactttgggaggtccaggagggaggatcatatgaagtcaggagtttgagaccaacctggtcaagacaacaagacctccatctctacaaaaacaaaacaaaacaaaacaaactacactgtaccttacagcatcttgcacatggcaggcactcaataaatagcagcaactatactgtcattagtaaattaagcacagatgggtcatccctaaaggaccctctgatggccaatagatgcacactgagaaccagtgacttgaggctctctatagcaagtgaagctctgaacggagaaaattctcggtcgggcgcggtggctcacgcctgtaatcccagcactttgggaggcgtcggcctcccaaaggaaggaggataacgcaggaggataacgaggtcaggagatcgagaccattctggcaaacacggtgaaaccccttctctactaaaaatacaaaaaaaaatagccgggtgtggtggcacgcgcctgtaatcccagctactcaggaggctgaggcaggagaatcgcttgaacccgggagtcggaggttgcagtgagccaagattgccactccactcctccagcttggcgacagaaagagactctgtctcaaaaaaaaaaaaaaaaaaaagaaaattctcaaactctttccccgggagggaggcaggcagctcagtgtagaccagagacctctgatcagacatatgtgggttcctcatagcttccaggctggctgttttgtggccagttaccctctctgagcctgattccttatctgtattagacaataagaccatatgttcttcctcctgagaggcaggtaaaggtgtactgtaagagcacaggcatcagaggattgaaacctgggcttaatcctagctctgccacttaatagctggaccatgaccatggcaccctatttaacccttctgagcttcacttatctcatctaaaagccttcctctttgagtagttatgaggattatcagataatgtgctggtgcctggcaaatagtaacaatttcacttgatacatgaaagtgtttatcttatatccagggccaggtacaggaaggcactcaagaaatgtgctgatggccggcgcggtggctcacacctgtaaatcccagcaatttgataggctgaggtgggtggatcacctgaagtctggagtttgagaccagcctggcgaacatagcaaaaccctgtctctactaaaaatacaaaaattagcccagcaaggtggtgggcacctgtagtcccagctacttgggaggctgaggcagaagaactgcttaaacccaggaggtggaggttgcagtgagccaagatcgtgccactgcattccagcctgggtgacagagcaagactctgtctccaaaaaaaaaaaaaaaagaaagaaaagaaaaagaaaagaaaagaaaagaaagaaaaagaaaaagaaatgtgctgaaccaaactctccacttgggtggaagggtgttaagaaaaaagattctcctgtaaactggtacccactgctgtgggcccaggctaactaaccctattaaaatcccaagtacacatacccttggccccagtaattccacttttagggattcatcccccccagatatactgtattcatatatgggccaaatgacaaatatacagggctattcattgagtgtcactattataactgcaaaagactggaaaaaaatgtgtctaccaatgggaactggttaaagtatagaatagtgccctgtgtagaatactatgcagcattaaaaagactgagaaagcttttatgtactgacacagaaagatcttaagagatacaactttgatatttgcatcctatgacaacaaaataacaccactactgtgtaatcaaccacactagggttgctaccatctctgaccctttgtctttggatgctgttaagctaaaagcggaccaggatccatgatgaggttcctctatcctctgggttaagtctgtccaggtaaaataatagggaaagaagaataccattaaaataaaaattggctggacacagtggctcatgcctgtaatctcagcactttgggaagccgaggcaggaggactgcttgaggccaggagttcaggactagcctgggcaacgtggcaagaccctgtctctataattaaagaagaaaaggaaaggaagaaaggggaagggaaagggagggaaggggagggggagggcaggggaggggagggaaggaagaaagacagctgggtgcagtggcttatgcctgtaatcctactaacacttcaggaggctgaggcgggtggattgcttgagaccaggagttcgaaaccagcctgggagacatagtgagatcccgtctctacaaaaaaaagaaaaaaaaaaagaaagaaagaaaataaaaattatcccatggtggtcctggaagaaacaagggaaggtaggaaacttaatcctagaggcagtagtagtcaggctctaggagaagggctggcaaccgcctgaaaatcccctccccagtctttccttaccactccctctcctgttttctttaaaatcagtctcttccatgcctgctaagaccactttatcaggaactcctgaaagtagatggagactaaattggctctgaagaatacaaatggctaacaaaacgttaagaaaagatgttctgccaggcgcggtggcgcacgcctgtaatcccagcactttgggaggctgaggcgggcggatcacttgaggttgggagttcaagaccaccctgaccaacatggagaaatcctgtctctgctaaaaatacaaaaaattagctgggtgtggtggcacatgcctgtaatcccagctgctcgggaggctgaggcaggagaattgcttgaacccaggaggcggaggttgcggtgagctggagatcgcgctattgcactccagcctgggcaacaagagcgaaactctgtctcaaaaaagaaaaaaagaaaagatgtgctacctcacaagtagccctggaaatagtccttggatatttttaactttttttttccccctgtgacagggtctcactctcatccaggctggagtgcagtggcataatcatgactcagtgcagcttcaacctcccggactgaagagattctcctattttagcttcccaagtagctaggaagctaggactacaggtgtgtaccactgcaaatgactaattttttttttttgagagacacagggtctcactatgttgtccaggctggtctccaactcctgggctcaagccatccttccacctcagcctcccaaactgctgggattacaggtgtgagtcactgcacctggccaattttaaacttattcttatgataatatttaatcatgtacaaaagtagacagaataaaacgaacccatcattcaacttcaacaagtaccaacttggtgccaatctgatttcatctgttccccaaccactatctctcactccagtagtattttgaagcaaatcccacacacaggtcagtatgtattttttttttttttgcagacagagtctcactctgttgcccaggctggaatgcaatggcatgatctcagctcactgcaacctccgtctcctgggttcaagcaattctcatgtctcagcttcccaaggagctgggattacaggcgtgcgccatgatgcctggctgttttgataaactctctcccacatgctggctttgagaatcaattgaaaagttaaaaaagaaaaaaggaaaaaaagccccaactttttcccaaagagggtacctttgttcattatgagatattaatacagtaggccaggcacggtggctcaggcctgtaatcccagcactttgggaggccgaggtgggtggctcacctgaggtcaggcatttgagaccagcctggccaacatggtgaaaccccgtctctactaaaaatataaaaaaaattagccaggcatggtgacatatgcctgtaatcccagctaacttgggaggctgaggcaggagaatcgcttgaacccgggaggcagaggttgcagtgagccgagatcatgccattgcactccagcctgggcaacagggcgagactctgtctcaaaaaaaaaaaaaaaaaaaaaaaaaaaaaaaaaaaagaaatattaatacagtatatacaataagctctaggtataacttaagtcataaataattcaaatttacagcctttaacaccctatggaggccaggcatggaggctcacttgaggtcaggagttggagaccagcctggccaacatgttgaaactccgtctctactaaaaatacaaaaattagctgggtgtggtagtgcatgcctgtaattccagcttcttgaaaggctgaggcaggagaatcatttgaacctgggaggcggaggttgcaatgagccaagaccgtgccactgtactccagcctgggcgacagagcgagactctatctcaaaataaaaaataaaataaaataaaataaaataaaataaaataaaataaaataaacaggctgggtgtggtggcgcccggcgaacaaattaatcccagctactcaagaggctgaggcagaagaactgaaagactatatttgtaacatgcatagacaaagtattagtattcaaaatacattttaaaagcctacaaacccataagaaaaagtcaaatcaaaaggaaatggagcaaggacttgaacattttacaaagaggaaacatgaatggccaacagatgtaagaaaagattcacagccccacttgtaatctgagaaatgcaaattaaaaccgcaagataccatctcacacccaccagctccataaaaatttaagtctgaccatatcaagtattaacaaagaggtaaagtaatggaaaacccatatgctgttggtggctgtgtaaattcacacaaacacaggaaaacaatctgccattaccttctgatcaagcaattccacttctgtgtaaaccctacaacaatgattctcagtgaggtcccaggaccaagagtggcagcatcagctgagaagttgttagaagtgcaaattctgagggccccaaccctgacatacacaatcaaacactttgggggtggagcccagcaatctgaggtttaacaaaccttccaggtgattctgatgggcagctaaagtttgggaaccactgcctgggagaaactcttgaacatgtgcatgtgcaggagacacaaacagttttcataacagcattgtctgaaacagcaaaaacaaggggacaacccaaataaccactgacagcagaatggatacacagcttgagacatgatcatataaatggatacgaaaatgaacaaattatgctatgcaagtaacatggatggatctcaaccttgaatgaaaaaaggaaactgcagatgataaacacagcataatacctaaatgaagtttaaaagaatgcacaggctgggcgcagtggctcacgcctgtaatcccagcactttgggaggctgaggcaggcagatcacgaggtcaggagtttgagaccagcctggccaatgtggtgaaaccccatctctactaataatacaaaacttagggctgggcgccgtggctcacagctgtaatctcagcactttgggaggccgaggctggtggatcacgaggtcaggagttcaagaccagcctggccaagatggtgaaaccccatctctactaaaactacaaaaattagccaggcgcagtggcaggtgcctgtaatcccatctactagggagtctgaggcaagagaatcactttaacccgggtggcagaggttgcagtaagccaagatcgcaccacactgcactacagcctgggcgacagagtgagactcggtcttaaaaaaaaaaaattagtcaggtgtggtggcgtgcgcctgtagtccagctactcgggagactgaggcagaagaaccgcttgaacccaggaggcggaggttgcagtgagctgaggtcgcaccatagcactccagcctgggcgagaaagtgggaccgtctcaaaaaaaaaaaacaaaaacaaaaacaaaaaaaagcatgtagaagaatatcctatattgtttaggaatatatacctatatatatatagtaaaacttaaaaaaaaaaaaaaaaaaaggtagccaggtgtggtggctcacacctgtaatcccagtgctttgagaagctgaggtaggaggatcgcttgaagccaggagttctagaccagcccaggcaacatagtgagatcccatctctaaaaaaaataataataataattaaaaaattagctacttggcaggctgaggcaggaggatcacttgagcccagaggtttgaggctgaagtgaggtatgatcatgccactgcactctagcctggttgacatggtaagatatcacaaaagaaaacacagaactcaggagtatggatggtggggtagctgtgattggggagggggtacacagggggctctaaggtactcacgtttatttttgtttgtttttagagacaaggtctccctctgttgcccacactggagaacagtggcgcgatcatagcttactgcagccttaaactcctgggctcaggtgatccccgactcaaccttctgagtagctggagttataggcgtgcaccaccacgcccagctattttttaattttagtttttgtagagatggtggtctcactatgttgcccaggctagtctcaaacttctggcctcaagcattcctcctacctcagcctcccaagtgctgggattacaggcataagccatcatgcaaggcaaacatatgtttgattattaattaatctgggtgatgagtttacaagtgatgattttcctatttttaaaattgtacatatgcattagatattctctgttgtatttatgataaatttctttaaaaaaaaaaagtgtactgaaacagtgcaatactctgagccagaactgtaacaactaactcaacatatgcagtgtccgaagggttaagcctgtttctctgcctgtgggtgggagggcaggcagcagctggggcacagtgggagttcctggctccagctggctccagcctggatcaagcaccacgcccaggaactggcacctgtagggggggcttctggacaggtggcacctgtagcccttggtgacctgatacatgtgagaggctgggcccagtcagatgggtggtgggcttctgtcagagcccctccatctggtaaggaagtttgctggtggcagcttggagctggtgagaaggggaagagggtctaggacacaggatgggggtggggaaggaagtgggtgggctgggctcagataccaagggagggtggtgggattagcacctgctgagaatgagattaggtttcttgggaagggctcatctatctaatgctccccgaaagctgtctccctgtggcttttctctgctggacagatggtgtctgagctgcctcttggagggcgggctccttgagggggtggtggaggtggagtgtgacctgctgcctgctttccagaggaccttgaggccctgggacttcttgtcttccaacaatagtaataaggattagagctaactcttactgaaggtttaccatatgccaggcattgtcctaagcccttcatacaaattaccctcatttagttttcacagcacccaactgcctatcatctagacagtaggcttacattgaaggaaactaaggcttggcaaagtcaaacacttgctcaaagtcaaacagtaagcagggcctggtggcgtacctataatcccaggaagatagaggcgggaggatcacttgagcccaggagttcgagacaagcacaggcaacatagtgagacctcatctcaaaacaacaacaaaaacaaaacagtaagcaaactaggacttgaatgcaggcagttcaactccacagccctagcaggaaatcactatcagccaaggcatcttccccttattaaatggcagtaaggactttccagtttcttaagccaaaaacctggactcctttctctctcacctcttatccagcaaacatcagcaaatccagttggtccaaccttcaaattgtattgaagctctgaccactgctcgccacttccaccacccatccaccctggtataaactgctgttatcacccacctggcttctcactggtctcctgctcccgctcttacccatagagtttgttctccacatcagagagatccttctaaaacctgtcacttctttgcttaaaaatcctccatgcctttccactgcccttaaagcaaggtcccatgtggccctacaagacctggcccctggtgacgtctcagacctgattcctaccactggcttactctactctggccatactggccaacttgctgtactttaaatatgttggagagtctttttttgtacttgctttattttttaatttttttgaaacaaggtcttgctctgtcagccagactagagtggagggacaggatcatagctcactgcagcctcaaactcctggatttaagccatcttcctgcctcagtgtcccgagtagctagctaggactacagacatgcaccactatgcccaactaaactctggctttgtcgctctggctgatctcaaactctcagcatcaagtgatcctcctgccttggcctcccaaagtgttgggattataggcgtgagccactgcatctggcttttttttgttttacggcttgctgttctctatgcctacaacactattcccccatatatccgcacagctcatgccctcactgcattcagatccaatgtcactttatcagagaggccttcctaactaccctacccttccttttcccatccctaatcccttttctctgctttatttttccctatatcactaaatactacctcacatgttatttattttttagaggtgggttgtcactatgttgcccaggttggtctcgaactcctgggctcaagcaatactcccacttcagcttcccaaagtgctagaattaaaggcgagagccaccatgcctagccctgacatgttaatttacttaaaatctgtcacccaccttggaatgtccactgggtgagaatagggactttggttcgttcagactgtatgtccaacctttagctcagtccctgatatatgacaggaatgcaataaatacttgttaatgaacaaatgaatgaatgaccaatatccctcaggaaatgactcagactcaaaggggagtaaggctgcctgagtgtccttggctttcacagccctgatgacctttggtaccccatggcagcggtcaacgtccttccctattatgaaatgtcctgggtgcatagcatcaccactgtgtcatctacttgtgcctgcacccatgcaaacacacagggacacaaagctggaaaagggctggttttgagaaggagtaagcctgggcagttgaaacccaggttcggtgtactctagggcacttacttctaggtgactgtccttgccactgctggcgtaccaaggtctcccagtcatatgcccatgcactgtatacattttggcatttattctcatgaataaagtgtcattagaggccagacactgctggctaacgcctgtaatcgcagcactttgggacgtcaaggtgggaggactgcttgagcccaggagttagagaccagtctggacaacacagtgagaccttgtctctactaaaaatttaaaaataagctagtcggccgggtgtggtggctcacacctgtaatcctagcactttgggaagccgaggcgggtggatcatctgaggtcaggagttcgagacgagcctggccaacgtggtcaaactctgtctctaccaaaaatacaaaaattagctgggcatggtggtgggtgactgtaatcccagctactcgggaggctgaggcaggagaatcacttgaatccaggaggcggaggctgcagtgagccgagatcaagccactccagcctgggcaacagagcaagactctatctcaaaaaaaaaaaaaaaaaaaaaattagctaggcatgatggcatgtgcctatattttagcttcactattttcacatgtaaaatggatgtcacagggcatatggctccttggaatattacatgagataacatatttaaatcattcagcagtatacttagcacccatggagtgctcaatggatggtagctctgtagatcagctctcaatagagggacaggccattagataagcttggggaaggcttcctggaaaagactggcttggtactggactttggagcctggatagaatatacatgaatgttggctggaaggagcctattcaaatggaagagggaagaggacaggctttggatgctggcagtttgctgtgtaatctttaacaggtgactttcttttttttttttttagacggagtctcgctctgtcacccaggctggagtgcagtggcacgatcttgactcactgcaacctccacctcccgggttcatgccattctcctgccttagcctcccaagtagctgggactgcaggtgcccgccaccacgcccggctaattttttgtatttttagtagagacggggtttcaccgtgttagccaggatggtctcaaactcctgacctcatgatctgcccacctcatcctcccaaagtgctgggattacaggcgtgagccactgtgcccggcctaacaggtgactttacctctcaaagtctcagttttcttctctgtagaatgtggataccactagagcatacctcataaaactgttgggaggattaatgaggtgctatactgataagtggaaaccactgaacagaatcctcagcatgtgctgttgctgtttttttttttttgagacggagtctcgctttgttgcccaggctggagtgcagtggcacaatctcagctcactgcaatctccacctcccgggctcaagcagttttcctgcctcagcctcctgagtaactgggatgataggcacacgccatcatgcctggctaatttttgtatttttagtagagatggggtttcaccatgttggccaggctagtcttaaacttctgacctcaagtgatctgcctgcctcggcctcccaaagtgctgggatgacaggcgtgaaccatcgtgcccagcctggtgatcctttaaaaatgtatgtcggactgtcatttcttggttcaaaaccctccaatgactcttttttctgagacaggattttgctctgtcgcccaggttggagttctgtgagatgtgttcatagctcactgcagccatgaactcccaggctcaagtgatcctcccaccttagcctcctgagtagccaagattattggcatgtgccaccatgcctgacaaattttttgtagagatggaggtctcactgtactgctcaggctgatgttgaattcctgggctcaagtgatcctcccacctcagactcccaaagttttgggattacaggcatgagctactggacccagtcgattttccttctttttttttttggagacggtctcgctttgtcacctaggctggggtatagtggtgtgaacatggctcactgcaaccttgacctcctggactcaagtgtttctcccatctcagcctcccgagtagctgggaatacaggtgcgaaacaccacacccggctaatttttgtatttttttgtagagacagagtttcgccatgttgcccaggctggtctcaaactcctaagctcaagcaatctgcctgcctcagcctcctaaagtgctcagattacaggcatgagccaccacacctgcccttttttgcttttcaattagtgagtcaaggggagatctccaatatatctccaatagtgtggtggctggtctgctctgaaatgtaagcagtttttttttgtccccttgaccagactctaaaagtcttaaggtcaaaaagtccacaaataacgttttgtttacccatcctacagtgctaggcctaagcctcggacttaggcaaaggagatcagaagggtcatatggctaaatgtaggtggacaagagggagtcggggagggccttcctgtgaatcctcctgcctctcaaggacgctctgttcccttagcttgagaagccttgaggaaagctttttccatgaacaagcttttaaaaaccttttagctctttaaaagcagcaagtaccattccagtcatgaccctgcagacaggtggaacacccatactccagcctcattctgaagagacttgcagagcaggaaggaaggggtaatgactttcagttccagtaatgtatctagaagcagcagctgattcagctagatgatgtcaccttcccaaacctcctgaccagcagctgagatggtaaaagcaggaaacaggggatactcagctggctaagtccgaacatgcctctggcaaaggcctacagtaaccccaggctctggaggcatcctcctgaagatgaggagaaagagtcctctcagctgggagtacagtaggtgtccttcaagaccctcaaaccaagatgcttctccaactctccttttgctaagcagctttctgcatatcctgaaccaacaatccttcatttattccaagagtggagcaggggaaagaagcctggctttagagccagcccaatctaggtccaaatccaggattcaccacgtaaagctgcaggaccctggcatgcaacttcacttatccaaaccttagtttctttactggaaaagaaagtagggctaatggaccatttagcacacagtctaggtgagggaattaaatgagaaaatgcatgtagagtacctgacatgggctaggtgctcaataaatggtagtcaaccattatcccattggatctctgcagaggagatttgaaagatcacctccatctataacacaaaaggaaacaaaggtaccaactagacccaacagtgtcaaagctgagtaactgagttggcccatgcatatagttgcttcctagatattccattactcagtttcattttctgtacagcatttaacccaatccctgaaataatcttgtttgtttctcgggctagctgtctctcccattaaagtaagagttctacaagagcaatgtccttgaccttatcttgtttatcttagcatcttcagcatgtagcacagggcctggcacatagttggtgctcaataaacatttgccgaatcgccaaatgaatagcacctgggatggccaaaagctaaactgacaatggccccacacttaactcctcccctcactattagttgaaggctctggctcccatttcagaagctgccattgccacctgggaatcagcagcccaaccagtggccagcatgggcattagtccctgggcacgacctatctattgggataccagggctgccaaggagggccttggaatcctccccctggcacttgaagatcctacaaacctggttctagctgacctttttggctttattacctaatgaaagagacccctccacatatgcctaaaatttgactgccactgcccacgggtctcttcttgagagttggtctcagcctgcaaatcttaacccacattgactctcctactgggagctacagcccctcttttctccgctttgtggtaaggctcggtgtaaacctcacctcttctgtgaagtccttccctcatttggcatttagcatttattgttggcttttacaagatctcctttcatgtatattatgtcttttctctctaattcaactggaagtatcttgagagcagaactgggtttccaatggcaatatctcaattaataaaccttctacagaaaagactccttgaaacaaagttagctaggtccagagaggactggagaggggtctaggctcctccctgctggaccagcccctttggcaaaaagaggagatcgtgttgcctcaatccaggagcccagctgatgaggcaggaagggagccagcaaatcctagactattaggtgcagtctgggacaatcccaaggtcatctatgtaattagattttttttttttggagacggagtcttgctctgtcgccaggccggagtgcagtggtgtgatctcagctcactgcaacctccgcctcctgggttcaagcgattctcctgcctcagcctcctgagtagctgggattacaggcacgcgccaccacacctggctaattttttgtattttagcagagacagggtttcaccatgttggccaagacggtcttgatctcctgacctcatgatctgcccaccttgccctcccaaagtgctgggattacaggcgtgagccaccacgcccggcctgtagttagatttttaaaaaaccatcattttaaatgaatctgggcaatatttagttataaagaatggcataaaaactgctcagttcaaaggacttttgtaacatacatttgtgtgaactaattttacttttggctcgtcttcttacccatattttcctttcacccgactcccttagctacattatccttttggttgtatgaattttcctaagttgcttccaactctttgtaaaacagagcaaggttccaataaaaaataagattggtccagttttcttttaagtggtacagtggtatatataaaaaatgatgttccaaacaactcattataacaattaagaataagtggcaaaaataatgcatgtaaatcactgaatacagtgcttggcacttaatgagcattcaaaagtaggatgaaagaacactattaattctcattagcttctcttctctgggcctcagttttttcatgtcttaggttttgttcatttgtttaataatttattcaaaaagtattcactgaatgtttactacctgcaaagaacagctgcagacactggagatacaatgatgaacaaaccaaacgccctataatcatggggcttatattctaatagaagagacagacaaaaacaagtacacaaacaaaaagaaaattccaggtagaggctgttgctatgacaaaactacaagaagactggagagggatttagaaatagcatggctactttaaactgaaggtcaaggaaagtctctcagaggaggtgaccagcaagctgaaccaaatgtaggcctcagaaaggaaatactaggggcagaacatttcaggcagagaaaagagcaactacaaaggcccttgggcaggaagaagttatgccaggatccagaagcagcaaggaacccatgcggcttgagtggagtaagggagagacagaatgatggaggggcagccaggaccagatcacacaggcctcagaggttggtaagaagtctgggttttgctgggtgcagtggatcacacctgtaatcccagcactttgggaggctgaggtgggcagatcacgaggtcaggagttcgagaccagcctggacatcatggtgaaaccccatctctactaaaaatacaaaaattagctgggcgtgatggcaggtgcctttatttttttatttttattttttgagatggagttttgctcttgttgcccagggtggagtgcaatggtgcgatcttggctcaacacaacctccgcctcccaggttcaagtgattctcctgcctcagcctcctgagtagctgagattacaggcatgtgccaccaagcctggctaattttgtatttttagtagagacgggtttctccatgttggtcaggctggtctcgaacccccaacctcaggtgatccacccgcctcagcctcccaaagtgctgggattacaggggtgagccatcgtgcccggccagtgggcacctttaatcccagctactcaggagtttgaggcaggagaaccgcttgaacccgggaggcggaggttgcagtgagccgaaatgacacttactgcactccagcctgggcgacagggcaagactccatctcaaaaaaaaaaaaaaaagtctgggttttattctaactacagtggaagaccacttggagggttgtaaacaaaaatgcaataagatctgaacttggtttttattttattaaattttttgagacagagttttgctcttgttgcccaggctggagtgcaatggtgcaatcttggctcactgcaacctccacctcctgggttcaagtgattctcctgcctcagcctcccaggtagctggcatcacaggcatgagccaccatgcccggctaattttgtatttttagtagagatggggttttaccacgttggtcaggctggtctcgaactcattacctcaggtgatcacccgccttggtgtcccaatgtgctgggattacagatgtgagccactgctcctggctaattttttgtatttttagtagagacggggttgcatcatgttggccaggctggtctcgaactcctgacctcaggtgatccacctgctttggcctcccaaaatgctgggattacaggtgtgagccaccatgcctggcctaaacttggtggttgtttttttttttttttgagacaagagtctcactctgttgcccaggctggcgtgcagtggtgcaatctcggctcactgcaacctccgcctcctgggttcaagtgattctcctgcctcagcctcccgagtagctgagaatacagtcatgcaccaccacacccggctaatttttttattttcagtagagatggggtttcactgtgttggccaggctggtctggaactcctgatctcaggtgattcgcctgtcttggcctcccaaagtgctgggattataggcatgagccactgagcccagccctgaacttgttttttttttttttttgagacgagtattgctctgtcacccaggctggagtgcagtggtgcgatcttggctcattgcaacctctgcctcccaggttcaagcgattctcctgcctcagcctcccaagtagccgggactataggcccacgccaccacacctggctaatttttgtaattttagtagagacggggtttcgccatattggtcaggctggtatcgaactcctgaccttagttgatccactcggcttggcctcccaaagtgctgggattacaggcatgagccactgcacccggccctaaacctttttttttttttttttgagacggagtctctccctgtcacctaggctggagtgcagtggcgcgatctcagctcactgcaacctatgcctcccaggttcaagcgattcttctgcctcagcctcctgagtagctgggattacaggcgtgcaccacacccggctaatttttgtatttttagcagagacggggtttccaccaccttagccaggctggtcttgaactcccgacctgatgatccacccacctcggcctcccaaagtgctgagattacaggcatgagccaccgcgcccagcctgaacttggtttttaaaagaccactttggctggagtattgggcaagagtgattttctaaggtcccttcccagctttttccctgtcattctaggctgccatgaactggttgcctgagccataaagacacagtttctggattagagtgactgaagagcttagagtggttccttgcccttggccggagtagggaatctgtgtcaccttgttctgcaggagatggaggaagtgactccctcagggaggggtgggaatcccatcttggaaaacatcctcaaaccacctgtattgtttctgcctcctgtgtggaagtttctgccaatgacacagtgctctctggaatgcacccccccaacgcacacacccaatcttccgtttacacaggcatagctgtactttgcattcctcctaggatttagttcaaagctagcctacaggaactggtcgataaagagttactgattgattactaaagaaagagaatattctcagccattaagcaaatattaatgagttttatgagtattatgttggtctctgggggtgcaaggtgattaaatgggtttctagtcttcactgagctcagaattcagtggatagaccaaaaactacagacaactacaatgctggatacaatagttataacagcaacatttactagggccttccttatccaggtaggacaagttggctttggagccagactacctgggttcaaatcatggttttaccacttactcgctgtgcatctttgaacaactttcttaacttctctataggaataataagagaacctacctgagtggtactattttgagaattcaatgaactatctcatataaaacacttaagtgcaagtgctcattgttaaatattactaaaattaccttaatacctgcaccatatgatcttacatacattcttacaaaaggctcttaaatccttacaaaaaccctatgaagtattattattatccccatttttcagatagggggactgaggctcagaaatggaaaggaatgcacccaaaatctaacagctgatatgtaatagagaccagattcaaactcaactctgtctgattccagagcccatacttccaattaacaaaatgatccccttttcataaagagccccagcacagtgcctaacacacagcagagactttataaagggagctatggttattatgtcattgtccctggagtttccagctgtagatgctgtagaacccagaggagggggcctctctttcaccctaaagggatctgagaagggtttaaaggtgctgggtgccaactacaggctttgcttgggagtcccaaaggtttccctcactggggcttgggatactaatatggaacctacactagcaccactaaatcagacccagaaagttcccccaggtgtccaaacacctgcatgaacaagcaggcagtttcctctaggttgacttcttgtctggccctacacatctctcagtttcatcactcagccaccagccctgggtctcatgtatgcacctgctgcttgacccagtcccaggagacactgagccttagaattgggctccttctctggaccttgccccaaaggctatttctgagtgactccctgggacttccctgacatggtaacccctagggctccaactgaacatgggtgctgtgagcaaggggaaattcttctgagtagcagatggagagtgggtagaacaagaggcagttgttctggatcagagataagcatggggtgagaaccatagtacactggattttatgtttaagcagcactgatcctcgatagttcagaactcccgcactgaagtccagcgtaggcaggtaaggacaacctggagccaggcattaatactcacttctacttcccatctgagtcatattcagagtctggccttgcctggtactttgactgcagaaggcaacccatggctaaatcaaggcacctcaagcctcatagagaaaagggaaagactcagcatttgctgagcttttactctgcactaggcaatgtgtaagtgcactttacatgtaccattaattattaggaatgtttgttaatccagtcactaaacactcagccaccaagtactaggcccagcagtagctgttaagagtgaataagacatagtttttatcctcagtaagctcagagcacctcgtttagtctttctcccaacaaccctctgaaatgagtattacttccactttatagatcttcaggtttacagagggaagtaacttgtccaaattcatgaagccagttaagtgataagatattgcttctactcaaaaaatgcttgttgactgaatgaatgaatgaatgacacagctatggctgtgactttagtcaaggagtagcaacaagaccaaatatttatagttctcaaagtgctttttcatctatcatctctttgggcctccctgctagcccatgagggaggcaaggcgggtgttatctttcttcaacatatgaggcaacaggcagagcttgggcaagaggcttgaggccacagagcaaacaaggagtgagtggggccatcctggaaaaactccagagttcccacaatgccatgtttaatcattcaaacccatgtcaagcacctactgtgtgccaggcatgctcctacccactttaaatacttaactcattaagtcttccactcagtcaacaaacaaggaggaccctgggaagataaaacaaaatatgccccattgccaaacgcctagtcaacaacactggccaaacctctactgtgtacaaggtatgacttgggccttgtagaggaggtaggggacaaggttgtgagccaaggccccaagcttcaggtaccttaaaatctctaaactcttggtccaaagatatccacatattctgtcagcctgaaagttcactcctggagagtagatccaatagcaatgacaacaatttgtttaccagtgattgcaatgtgacaataacagtaataatagtagcttgttatactaagtaattactatatgctgggctccttggtaagtgctccatgtatcttttcaactattttcatgctctcaagagtgtttcaagaaaagcgctgtaggccgggcatggtggctcacacctgtaatcctagcagtttgggaggctgaggcggacagatcacctgaggtcaggagttcgagaccagcctgatcaacatggagaaaccccgtctctactaaaaaaacaaaattagctgggcgtggtggcgcatgcctgtaatcccagctactcgggaggctgaggcaggagaatcacttgaacctgggaggcgaaggttgtggtgagccgaggtggcaccattgcactccagcctgggcaacaagagcgaaactctgtctcaaaaaaaaaaaaaaaaaaggaaaaaagaaaagcactgtatattgttacctcttttccatacatgaggaaactaaggctgggaaagattaagtatttgccaaggataactattaagcaagtgagactcaccaactcaacaacggtttgtcaaatttcgtacctgactcttaacaacgatggaatttctcccaaggaggcaaggcagacaccaggaataccaggagcagctgctgcctgagagagtggggggcctccagagcccccagaagagtcttcctaacctctttccatcaggttttaacatcacactgagatggggaggtaaggaaagaatggttaggtgtgctcaatctatccttagggcaacaagggtctggccctctttgttgaccctcaagggaagaagtttgtgacttcccatttgtcactcaccaaccctctagagagaaacagaagggggcaagggcatgggagtattttctccctggggttggggggcacacacaagggaagaagcagcagccttactggctctttcctcccctgggcaagaagcctgtacatgtgatacagtgtatgtcattcacatggaacccccttggggaaatgccaaggtaccttttggacccaagaagcctcagagaggagagactggcaaagccctgaactgcaagctaagctgacaatttctaagcattgtaactaggtcatcaggttcctggagaagccagctgtggctgggggatggggaggaaaattttgcagcctaccaagatccctacttccctttaggccccaccctccctgaaatctgcacctgctcccaaactgacccctccccccagctgagcccagctgtcaacggctcccaatgccccgccctgccttccttaggccagaaccatgggggcctcttgggcaggaggtacctgattgccacctgagctttgcagagaaggagctgtggggcagggaaggattggcctctcctagaagatatttcttgctccaccagggcagcaagaaagttaggcccctttgggcctacctagggtacccttcctggcattgtcactgcaggtggcaggagacaggtgatgtttaccctgctgaggccagagttgccaaaaggcttcaatcaatcctttgaatctgcacctggccctgagtcccaaaataacaaccagggcagcttacctgatctgcaggttgcaggtgcctctggcttttctctccctgcagctctgcctgctgagccctggctggcaagagattctttttcttaggggttactgagacctaactgcatcccacaggtgctctgggcctctccccattaggcccacctctaccatcaaccatccctctgtccagaggcctctgtcatcagccacctggtttcttccctgaccaactttattgctgacacagaccatctttggctctagccagtctgcctcctcatgatctctcaaatgcttcatacatactccaccctccagttctgtctgggtggttcttacccgtctggcctgctcgtgtgtgtgtgtgcgcgcgtgcacgcgtgtgtaactagcctgatctttttggtgtgtgtgtgtgtggcagagtctccctctgtcgcccaagctggagtgcaatggcatgatttcagctcactgcaacctccatttcccggcctcaagtgattctcctgactcagcctcccaagtagctgggattacaggcgcccgccaccacaccctgctaatttttgtatttttagaagagacgagccgggtgcggtggctcatgcctgtaatcccagtgctttgggaggctgaggcgggtggatcacgaggtcaggagatcgagaccatcctggctaacacggtgaaaccccgtctctactaaaaatacaaaaaaaattagccgggcctggtggcgggcacctgtagtcccagctacccgggaggctgaggcaggagaatggcgtcaacctgggaggcggagcttgcagtgagccgagatcgtgccactgcactccagcctgggcaactgagcaagagcaagactccatctcaaaaaaaaaaaaaaaaaaaaaaaaaagaagagacaaggttttgtcatattggccaggccagcctcgaactcctgatctcaagtgatccacctgcctcagtctcccaaagtgctgaggttacaggtgtgagccaccacgcccagccacagcctgctcttgttacattcttttcacctatttaaacccatcatggtccacatcttcctaagacataacaatgcctaacattgactgagtatatcagacaccgtgtgaggtggtctacacagtcacttattcaacaaatatttgctaagtgcctcctatgtaccaagcactctgctagatgctggggatgaaagacaggataaagcccgtgtactccgagagcttatgttttactacaggagacagatggtaaacatgtaaacatggcgacctctagggaggtgatatctgagttgatacctgaatgataagaagagagagagccctgatcagatccataggatgagtgatacaggcagaggaaaaacagcaagcctataaggaagagattactatcatcttcattaagagattagtattatctccatttacagaccgggaaactgaggcctcagtggaaattgtacaaagctacggtgctgagaaagctatgattatttaagctgtcagtgacctctctccttcctaaccctttccactgttgatgcagaagacagtctggattggcaatgcagttggctagggaaagggtgcaggttgatgatacaggctgagggtggaggcctctgggcccagtaatcaactgggtagctgatggtggaagctggcccatttggcagaggcccagggcccagcaatgcagtcaggtgggctcaacttcttccacttttggtgtttactctacaggtttggcacagtttgcctcaagccattcaccaagtgtttgaggtctattcctactgcttcaaatgagtttgcttccttaggggcagaaactttttttgtagcctaacctgtatctaataataacccttcatgttcattgagcaggccctggctgagtcctcacccaaccgcgggccctgagccaggtagtcagggtaaaataagccagtctgggcttgtaagaagcaatgacgcttataggcttttgcatcagacacatctgagtataagacccagctctgcctcttagaagatctgttactgtggacacattagggagcctctctgaaccctagattctccatcttcacaggagagcatttgtgagaaccaagtaagatgattatattgaggggataaacacagcacctggcacagagcaagtaactactcaacccatagtatctgttattattaccaaaaaacacacttacatttcactttctcattcatgcctcacttactctggtggcttggcattattctctcaggcttatggatgagaatttgaagctgatttgctttgtgttatgccaccagcaaggagtcaagctgtctcaaatgtgaggccagagttttgtctgtgtatgtgttgaaggtgattaatacatatcaactataatgaatcttgcctggtgtgtctggcagctgaggagaaggatggatggcacatgtagactgattcagatggcagagggacaccagcaagacccaaggtgtggagtatggaaacagaccattgagggatgggactcagtctcagttaccacaatatccacagtatcactagcatttagcacattacaaagcatttgtcaatatttgctgatttaacaaaagaaatgaaactccaaggacagctccaagccacacatccagctttaggagaggcagacagtattgataatactgtgttaaaagccagaacatgaattctaagtctgatgctgccatttactgtgggacaagaccccttatcttagtttcccctctggaaacagggctgaacatacccacctctcctacttcactgggaaataacttataaaaggagtttggtaaattgaaagtattatcatgcacataaaaagaataatcatgacaatacagactactaagacagtagagtgtgaatcccagctcttcttggtactagcctgtgaagctctgggtatatcacttttctctgagcctcaattttctcaaccataaaatgaaggtaacaacacctactttgcaagatttttaaggactggagataaaaaggacaggcttcagagtaagagagacctggtttcaaatgctgactctgcctctggctaactataagccctcccaaatctcagtgcctataacgataaggttgttgggatagtaacaaaaacagcgtcactaaaggctgtcacatagtgagcactggattaatgccagcagtcacctagacaatagcgcactggacgagggaacacagtggagcgtttaaaagggggaggttggaagctaccctcccaggctttgcctcttactaactgtgctactttgcataaattgcttaacctctctgtacctcagtttcctcatgtgtgaaacagggataaaagaacctacttcagagtgctgctgtgagaatgaaatctattaatacatgtaaagcactttgaacaatggctggcatagagtaagcactcaataagtgttagatactattaatagtaatgttaacaataatattaatcaccaactggagtaagagggagggactgtttatcctgggacatgggtgtcccatgaaataattacagagaagtctcagcagctgtttgtaggcaagtttttagcctcgaagactctatggaaaggacacgaggctgggggctcctgagcaaatatcccagtcccactgaccaggaggccagtctctagggaagcgagtcaggctccttggaagggacactatgttcctatccctgcctgactcgggggaacaaaggcacgtgtgtatgtgtgtgtggccagggaggagggaggggaatgtttccctttcaagagaggaacaaaggatctgaggcatagttgagtgcgttccaatcccctcccaggccagctcccattcctcagatgattgtccaacaaggttttcaaccttctagcttcctcctcaaaggtgactgggggaggggaaggcaggctctgtttcactccaccctttatcatcaatttccaagaggcaggatttatatgtgccaaacctcaagttatctcttaagaatcccatcctatgcaggggtggggtggaatctcctaggggaactcagggttaatggatgacacagggcaccgcaagcaacaggtttaatgcatctccaggggaagtccaggactgaaactgctaatgcgtgatggagccaaggagagaacccaggaattctaactgacctccctcacagcctagcctagggtagggggtaatggcctggcagaaccaagtagaaaggcattttctaaatcttgaagggatgatcacagctggaggcagaagccaggtgaaggaggaaagggtagggagcaaagaaagtaatggacaagaggaaaggcagggacacgtccaaaaaaagtagtttttggggggcggacctctagggacattgctttccagtttccacactcttgccggcagggctgggacaggaagcagtccatggaagtcatcgcaatggcatttcctgaagagctggagaaaaacctccagttccgaggggagcactggaggctgcccaaaaagctgtgtggctcagagttcactgtaaggctcaagcttggcccgagagtctcatcagggatgaaaccaaatagcagacggtcccaaaggcagtttctttatacaaaaccacaatttcaaaaatcaatatgtaaaaaaagagaagccagatgatgtgagtgaagagccctaggatgatatgaaagccttaaaagaatgaattaattcacccaatcttcagaaaaaggtggcattactatagccatttacaagttaaaagacttgcccaaggtcacacagcaagctagtagtcaagttccaatttgaaagtccaaaaactgcctcttcctcctgatgtaaccttgggcaagtcaattcatctttctcacctgatttctctcctttgaaacggagatgtcatccttcctgctcacctctctgggtggttataaggatcaaaaaggcaaggtggatctgaaagtgctttggaagctgtaaggtgttacataaatatagggtagcactattgtgggctcagtgataaactagcctgccttgacactgggtttagttaaggtgctgacatatctgtcaacaggagagagccattttaaaatataactaatgtgaaatatgctgtaatggtggaatccgccacaaggcctaaggatagagagaaccagcattcctttattgcctacttcaaaccctccatcttgcataaagggaaactggggactgggggtgaagtgacttggccaaggtgagactgagagtagaactgggattccaactccaagaccagtgcttacaccaccattgcacacaaacactgtggagctcctactacaacagaaatgctgcaagggcctgctctgagatgtgctgatgggtcactatggtatttagaaaaaggagagtggatgctcaagattccgtgaatgggtctctgacatgcgttctgtggaaagataataagaataatgataccaacatggctccagtctttatgcatctcaggtatacctcactgtgtctttaccatcgccccctgtgaggcaggtattattatttgtcccaagattcagagaggtaaaaggagcttgcataggtagacacggatgagttgggaactgaactcagacaaatttcatttactcagacagaaatactgttggagtggaagaggaccattcatcagaatatcacatttggagagaactattcccaaagaacatctatcttacttaactttgattctaggacctccaagtagttgaaaaatatggtttccaggatggctggacccatcaatataccatgtgcaagcctggtcttattctccagtccccgtctcactacacctccacctctaggtccaagccactattctttttcacctggcaattgcaccagcctcttcactgggctccctgttgccacccttaagaatacagaccaggcctggcacggtggctcacgcctgtaattccagcactttaggaggctgaggcgggcggatcacgaggtcaggagatcgagaccatcctgactaacatggtgaaaccccgtctactaaaaataccaaaaattagccgggtgtggtggcgggcacctgcagtcccagctacttgggaggctgaggcaggagaatggcgtgaacccaggaggtgcagcttgcagtgagcagagatcgtgccactgcactccagtctgggagacagagaaagactctgtctcaaaaaaaaaaaaaaaaggaatacagaccattccaccaaagccaaatcctcatcatggtctgtaatgctgtatgcgatctggcccccacctacttctccatcctcctcctcaaccattccctccccaccttctacccttttcccctttgctgtttcttctccagccacattgaccttcttgctcatccttgaaaatgtcaagcatgctccctcctgagtccattccctctgctttaaacaccctttgctgtagggtacctacatcatccacctccttacctcatttagcgcttggctcaaataaatttaggtaatacttttgttgggactcaggacataccatcccaaaatatgactgtaggaaaacaatatgccaccccaaaaatatacttctttggcatattttgaactggttattctgagaaactgcagacataagagtagctctgaaaagctgtccttttgtaaaagaaattcacatctaaaaaggaaatctacactagtaaaggtatctgtattaggaagagggctgctccagacaaattttattaccagagagactttttatttttattttttgagacagggtcttgctctgtcacccaggttggagcgcagtggcttgatctcggctcactgcaacctccacctcccaggctcaagtgatcctcccacctcagtacaccccctcaacagtatctgggaccacagacacacgccaccaccaattctttccctcaccctgccataacttgggttgctgccactcaagcccctaacagaagtcccaagccccatattcttttctgtagctcaggatgctatataagcttcaattatctgacccttctttgagcctcatattttgtaggattcctgtgtacaactatgtaattaattatttttcctccagttaatctgtctatgtcaatttaattctcagcccagccaaaggacctagaagggtagaggaaagccatttttttctcccttacaccttctttgatcactcttttaaaactgcagccccaccctcccttgctagacatgccctatgccccaacctgctttattttcttcatagcatgtacaatcatctgatataaacatgtaattatatatttattgcctgtcactcctcattggaatgtgagctccatgaggacagaaacttagttttgcttacttttgtttactgccatactcccagtatggtacacagtaggagctcaataaacattgtttgactcaacgaatgaattattaggtaaatagccactcccattattgttattctggcttgacaagggtctgtttcttcagaaatttagtgggtttctcttcaattaggtatctgctatgcccaaggcctctgctcagtgctgaggaaacaagcatggacaagatgtggcctccaccctgaggagctcctaaatctaggacagagtaaatctgttagaaatgtcttctctgcacataatttaagctctaccaactgttaacttcttttcatttatccaagttttgccaggtaccacaccaataaaaaaagactcagtccctcttccttcagatatctgaagctggtgatattctcctgggtcttctcttccccaggctaaacaaaaagacccagtgggattgcctgactcaggtctgccaactgggaacaaggaagacagactgtcggatagaggggcagaagagaagaggatccaggagtagagtgactccttcaaagaaaaaagagggagtccttagggaggactctgtggaattaggttggaggttgggtggggacagggcctctgcttaattaaggcagtaggagattatacttccgtagaaaagcagtacactgggaattacccctatgtctatccacattaaactcaggcaaaaccacagttgcttcaagaaagccccatgatggaaggctgagggcactggcaaaaccagggagactggacacagaggaggacgctcaagcccactggcctcaggacagatatctgctgggggaagggacagagataacaactgctgtttcatgcagcccaaacaaatctggggacacccatacaaaagtcaagaaaaccctccaggttccattggagccccctgaaaaaatacccgggtaattttcgacagaagctaaagggctctgtggggctactggggaaattattcctaggaagtctggaaaaccctgtgatggtaacagaattttaagagcaacctcaaatgtacactcagaagaagtaggtgtttcaagggggagcccctgagacacttctacttaattttgggacccgaatgagattactaaaaatttccacatttggggtttctaatggggtttccctaagaaaaccacagaactgccactatctgcaaagggagctgaggtgcttcaactaagcatacatccatctgaagaagccacattaggcaataagagatctacagaaactcagaccactgagccatacagcttaagaaaggccaagttatgttttctcccccaacacagttcattgctcccaacaattacgtttctatcaggctaagggatttcttcagggacagcaatcccaaagtggcaaggcccacctgggtcccttcccacattcccattggaaagcaccagaaacacttgtgtcccttcggggaaggtcatgtatacaacattccaggaaagtatcacagggactttgtttctcaaggagaaactctagggggaagagtcagttctctgagggaagctgcccattcattaaagggtttccaccctacaattatggcaggagaagggcttttgtgctagatcctttactcgagtcaagctatggcagctggctatcattattccattttacaggcgggagagacagatggacaagacagccgaacaggttcagcatttcatcaggtgactccaggcaggcagtaatctggctaagggtctacactttcagtccttgaagcatcactccaccactaagtagagatacctggggcaggccaccttctccccacacgcacaccactgtcatctattggcagggcctgagagggttttaacaatgaaaaaattggccggggccaggcacggtggttcatgcctgtaatcccagcattttgggaggctgaggcaggcggatcacctgaggttgggagtttgaaaccagcttgaccaacatggagaaaccccatctctactaaaaatacaaaattagccaggtgtggtggcgcatgcctgtaatcccagctacttgggaggctgaggcaggagaatcacttgaacccgggaggcagaggctgcagtgagctgagatcgcgccactgcactccagcctaggcaacaagagcgagactccgtctcaaaaaaaaaaaaaaaaagaaaaaattaataagcagctcactctgggcaaaaccctgatgcccacttgaaacctgccatgtctgagttttaccagtgccagaatctgaggctaccaacacgcctctgggaacctgctactgccaactatccttcccatagctacctgaacaaagccagttatcagtccagagtgagcaccttcacaggcatggtttgcttggcccaacagcatctctggctttctgggccagcatgtctaggtcactttattactccctggacaacttgataggatgaaaagtgttggctttagaattatgccaaccttggtgtaaattctcattcagacacttaactggctgagggacacctggggtcagtcacttaggcacaaagaccttcatgtgtaaactgggaataaactcaccttccttggaaggttactgtagaatatatgaaacagcatgccgtttccatgaaggaaggtaccatgcgtggcttatggccagcacctagtacactgctagcttcacagtagatgctcaagaaacactggttgcataagtagaggacctaacacagtgcctagtacttaacaggtactcaataaagactaatttccttcccctttcctgtagggatgctaaatttagaacatagccctgagtagaatagcccataactcctacccttaaggatctcccagccgcagtctccaggataattacccgatgccaccacagtagccagtcggtgcagcttggaacaggataatacctgagaggaagggggcgggtaccttctacccaggctcaaaggatcctgagtcaaatgttctttactccctggccttagggagagaatgtgtgctcagaaatggttctgatataactggctcttccacacacatcccctctgttcaccaagaggaagtgacatgtggtatgttgtccaacaggctctgatgattcttaagcaaagagatggaagatggaatttcaaccccatggagatctaataaacttacccagagttgctgtgtctaagacctctttcatatgcaccactgggcagctggcaattctctggtaggggtagccttctgcagaggctggctagcagaccaggcacctctcccagactgccttttgtttatagctggcaacaacccacctggtattaggaccactggccaaagacaatagtcaggcaaagtgggcaagcagcctcaatccctacttggagatgcctcagagggtgtgtctgcagtactggaatcctgtccctcctgtaatcagctgaacaaatatttgccccaaaagagaatcaaagcaggagggaacaggagaggtcactgcacaaaccaacaggaactatttaatcatttatccccctagagagttcatttacagaatggctttcaagtctagtcagctagctcaagagaacccaccacctttacctcccctgaccccaccccagttatctgacctctattgacttgacccccttgccttttacaagagctggcacagacgagttgaaattgcaaagaaatgcaaaatgagagagggggtggggttccagggcaaactcaggaggtctcttgctcagtggtaaagtgaagtgcctgccacaccctaggcccagcctatagacagttgcattcttgacattcctgagtccatggtgcatgtccccttccacctcagctccttcaatggatgacttattttccacagcttgatgcttttctgcatactctgaggggatagaacatctctcataaaacctgcacctccgctaggtagggagataagcaagaaaacaggactgaattcactgaagagcaaaacttgcctacagtgaccactggtaaagaagctttcaccaccatctcatcctggctcagtgatgggcaggagaactctccctccctggaaagggaatttgctggtgtcagtcactgtgctcacattatcgccaagatttacaatacactgtaaggcaaggagagcttgccacattttttagtgaaagaaactaagcctcaagaaagtaacccagcctgtccaaggtcacacagctagttacatgacagaactggaacttatacctgcatgtgaagtctgttactaaatctcaatgtcccacagagccccaaagactaggttcttgctttgccagcaaacagtgcttgaagaggcccctgggctctggccggaaagtaacaggcagagcagctggagctccccaaccgaccccaggcaatgaggtgcaaagtcccctggcttaatgtgtgacacagcaagtgctccacaaacaaggcaaccatgcagaaagtcgcacactttgggggaaatgaacttagggggcgcagtgcaaacacaatctgcacagcctacactgccccaaaatctgacaattctcagccattcaacccagtgggaactcctgcctatggccatgccctagtctgagaggagagtgccatacacgcaaactttgaaataaagggaacttgatttgggggagagaagcccaggataggactgagaccccttggggggaacagatggagaggtctgtgggtcattgatgctcatcatcttctccaggcattatactcatcacccctttgtgtgtgaaccattgtataaggtaagggaaacaccgaactaacttcctaccctcacaggtttgggacttaatgaacacataggctacagttttctttgctgagaaactggaacacaagtatggaatagtggagtcatgggggtgaccagggtgaaagatgcctgatctctgaagcacagggtcatttgtatttccaaggagttaacctcttgtggtgaaatgaggccagtcaggtttcctcaactatcaacgtctccaacaatcacccaacacaacagaaagagatacagaagaagggctgttggggatctctgaccagaggccaaagaaaagggacacacaaggggcttggttcttacccagccgccgttctcctggatccaaggctctaggtggtcattcaggtaagtggccatccaagctgcgatccgactcaccaatacctgcatctccttgtctacgctttccacgcacagtgccccgccgaaggagaaaaaggccacaatgcgaccccagtttaccccatcccggaagagttcattcactacctgttcaaagctctgatatgctgtccctggggtgatgtggagctgggatgtcaggtcactgaatgcccgccggtaccgcagttcaaactcgtcgcctgcctccctcagcgcttgctttactgctgccatggggatcacctcccgggcatccaaactgctgctgtggccagtggctccattcaccgcggggctgtctgccaggtgccaggatgggttgccattgatggcactgggggtctccatctccgattcagtcccttctggggcctcagtcctgttctcttccacatcactaaactgactccagctgtatcctttctgggaaagcttgtaggagagaaagtcaaccaccagctcccggttgctctgagacatttttataatagggatgggctcaaccagtccattgtccaaaacacctgctcactcactgagtctcgtctctggttagtgattctcttctaagatccaaagccaagataagattctgaagggagagaaagagcttcaggaaaaaaaaataattaatatgcatgccatttaccctaaaaattccattccccctccaggtaccagaactggtttctttgtgggtcttacgaaggtctgggtctaggttccaagatacttcacttaagtcaaatcgaaagcaccagtggactctgaatctcccaccagccttttctacccccgtcttctccgaaatgccttcctcggaaagtcactccctgggcagtcccccccgccccactcccgctcccccgcaccacctacattcaaatccgccttaggcaaaggcaggcaggtgcagcccccggaagatcttttgtatcacaggtcgggagaggaggtggctgcggggatgccggtaactcagccggcctcgcggtggctggcaaaaaaaccagctccggccggagggatcatgcgacccggcaggctgggagcccagaaggcgacacaggaattgcgaagctcaggaaccagccccctcgcttgcttcctcctccatcgcccggatcgagggcggccgctccgcagccgcggcctcctgccacccgggagcccagccccctctctcttgcacgccccttggctctccgcctcctactgggagccaggagtactctcccggaggtggctggtatggatttagttggtttttgtttttcttttttctatttaagcaccagcccagggtgaggtggaggcgtccgaaaccctaaagggacttctcaatggggttcaaggtttcagtgagggacgcagggagggggaaactgcctcagatctgcaatctgactttgggaaggccacccccaggcctgtctgtgatgttgaaggccggagacccccaacaaatgccgctggtttgctctgaattccccaaaggcccagaacgtggcagttggggattgccgggtcctccattccccgcccggacacaatggccgccggcgccctgcacaaagactgggtgagggtgaggcgctgggcctctcctcaggtcaggaagaggggtcgaggcctgctcgacggccccacagctgagaccacgttttcctggggacaggcccaaagtggctttctggcgcccccgggagggctccggggccgggggctgcacctctccggagcccagggtgggccggctgcggcctagcggcttctcgagctcactaggccgggtacccgccgagccaccgccccgttgctaggcaaccgccctcccccgggggcgccccctagaccttcctgagaggaggggcctcgcccccggcggtccgccccagcgcagccaatcagcgagcccagccggcacggaagcgggacggcgaaggctcctattgggcgcaacggctgtcacgcacaggggaggcggcgctctcacctgcgagccccgcgagccgtggggggccacatcccccttcatcggcccggtagcttccagacgcaagagctcttcgcggccgagttccgcgccgcggacccgggccggcctacctggctgccggcctacctggctgactgctcgcgccgtctctcccgaacaagccggcctcagtttcccctgaagagacaggggaacttgcaagctcagtcacttccggtgccgcggcaacgcgcgcgagcccgagacgcaaagggagtgcgcgccttgagtgactggcatcaggaccggggagagatcgccccctcgcggtagatctggggaatcgggaggcgcaaaaaatcaacatttataatcacatttccatttattcattcagtcagtcagtcagtcactcatcagtcaatcagcctatttcatccgtccgtcagtttatatatagaagaagcatcgccttgtggttaagcactttgtctggattctaactctgctagttaggcaagtttctcaactgctctgtgcttcaatgtcctcaattgtaaaatgggtaatagtaccaacctctctcgttgagctattgtgatgattaagagagttattaattgtaaactccataggacaggccgggcgcggtggctcacgcccgtaatcccagcactttgggaggccgaggcgggcggatcacctgaggttaggagttcaagaccagcgtggccaatgtggtgaaaccccgtctctactaaaaatacaaaaaattagctgggcgtggtggcgcatgcctgtaatcccagctactcgggaggctgaggcagcagactcgcttacaggagaatcgtttacaggcgtgagccaccgcgccccgccaatttccttacaccctgaaccacacagtgtgttatcaaatgttttatccttgccaattagatgggtaaaaaccgaaggcactttcatatttctttttttattatgaatgaagttgagcaatttgtcatattttttagtctttctttggagggtggtggatcttgtattggtgaattttcttcatattgtttacccctttttcaggtggtctttctgttgaactctttcctcatttttttttttttttttgttattgttgtttgttcgagatggagtcttgctctgttgcacaggctggagtgcagtggtgctatcttggctcactgtaaactctgcccgccaggttcaagtgattgtcctgcctcagcctccctagtatctgggactacaggtacacaccaccacgcccggctaatttttgtatttttagtagagacagggtttcaccattttggccaggctggtctcaaactgctgacctcaggtgatccgactgcctcagcctcccaaagtgctgggattacagacatgagccaccgtgcccggccttttttttttttttttttttgagacagggtatgtcacccagcctgcagtgcaatggtgtgatctcagctcacagcagcctcgacctccccatcccaggtgatcctcccacctcagcctccccagtagttgtgaatacaggctcgcacctccacacccagctaatttttgtattttttgtagagaatggagtttccccatgttgcccaggctggtctcaaactcctgggctcaagtgatctgtctatgtcggcctcccaaagtcctggaattacaggcattagccaccacacctggctctgatttacattttttttgctgtttttcgagatggagtcttgctctgtcacccaagctggagtgcggtggtgcgatctcggctcactgcagccttcgcctcctgggttcaagtgattctcctgcctcagcctcctgagtagctgggattacaggcacctgccaccacgcccggctaatttttgtatttttagtagagacggggtttcaccagttggtcaggctagtctcgaactcctgacctcgtgatccgcccaccttggcctcccaaagtgctgggattacaggtgtgagccagcgcgcccggtctgatttacatttttgaacctatggtgccacaattatctcaatgtgaaaactatcattatggaagcctcagtgtgctttgggagcccagcagagggcagataaactctgtccacagataggggctttactgaactggccctcaaaagaatagaattttgcttgggtgagaaaggatgtaggagcattttaagcagaagatattgcttgagcgaaggcctggcagcccagcgtgagagcccatggtgtcctggaaataaattgggatggctgaggggagtggtggagaggggatggaatataaatgtgtatccatgcgagcagcacatcaaatagcaccagaggagccagcaaagatttttttaaaccagaaagaacatgaagaaatttatattttggaaagatggatacatattttggaaaaagaattttgcaagtcttgaaaatggctctcaaatgatctttgactggaatctaatttaaagaaaataagttacatttaaatctaaagaaaataagttttcttttttatacttctctatgttgtctacacataactttgtattttttttcttttttctttttcttttttttttttttttgagatggagtcttgctctgttgcccaggctggagtgcagtggcatgatcttggctcactgcaacctctgcctcctgggttcaagcgattctctggcctcagcctccctcttttttttttttttttttttgatacagagtcttgttctatcgccaaggccggagtgcagtggcacaacctcggcttactgcaacctgtgcctcccggcttcaagtgattctcctgtctcaccatgttggtcaggctggtctcgaactcctgactttgtgatccgccggcctcggcctctcaaagtgctgggattacaggcgtgagccattgcgtccagctattatttttaattatataacactatctaaaaacatgctaactttggccgggcacagtggctcacgtctgtagtaccaacactttgggaggccaaggcgggtggatcacgaggtcaggggttcaagaccagcctggccaacatggtgaaagtccgtctctactacaaatacaaaaattagctaggcatggtggcaggtgcctgtaatcccagctactcaggaggctgaggcaggagaatcacttgaacccaggagacagagtttgcaatgagctgagagcatgccaccacactccagcctgggcaacagagtgagactctgcctcaaaaaaaaaagaagaatcccagaaacagaccagccatggtggctcacacctgtaatcccaccactttgggagtccaaggcggaaagatgcttgagcccaggagttcaataccagcctaggcaatatagtgagaccccctctctacaaaataaaacaaaaacaaaaacagaaaaagaacaattagccaggcctggtggcatacacctgttgtccctagcaactgagtagattgaggcaaaagaatcgcttaagcctgggaggtcaaggctacagtgagctgtgatcataccactgtactccagcctgggtgacagagtaagacaccctctcaaaaaaaaaaaaaaagggaatctcagaaacatattgaatggaaaaaatggcaaaagaataatgtaggaagattctacttatatacagtttagaaataggcaatatacaatttagagtttgtagcatctagcttcctccaagatggcacctaaatatccctgcctcttcgtattcatgcctttgtgtgtttccctcccacactgaaccacagttgttctgtgtgactaatgacaaattacagcgatggaatgtttctttccctcccttcttctctctctctctctctttctttctttcttttcttgacagggtctcgctgttgcccaggctgtagtgcagtgacacaatcacggctcactgcagccttgacctcccaggcccaagcaatcctcccacctcagtctccctagtagctgggaccacaggcatgtgccaccacacccagctaatttttgtatttttttgtagagacggtgtttcgccatattgcccaagctggggttatgtcactttcaagactttgttacgaaagattgtggcttcagctgggcgcggtggctcatacctgtaatctcagcactttgggaggccgaggcgggtggatcatgaggtcaggagattgagaccatcctggctaacatggtataaccccatctctactaaaaataaaaaaaacaaaattagctgggcgtggtggtgggcgcctgtagtcccagctactcaggaggctgaggcaggagaatggcatgaactcgggaggtggagcttgcagtaggccgagatcccaccactgcactccagcctgggtgacagagggagactccatctcaaaaaaaaacaaaaaacaaaacaaaaacccccaaaagattgtggcttccgtctttgtgtttgtggtctctctctcactctgggggaagccagctgccatgttgggagcagccctatggagaggccgacagtcatgtgagggtcctcctgccccagtcaagccttcaggtgatgacaaccttattagagaccctgaaccagaaccactccattaagctggattcctgatgctcagaaattgtatgaaataatacattattgtgattttaagctgctaagtttgggggtaatttgctctccaatagtagataacatatatatatatataccttatatacctacgtggtaagagaataacaaacacaaaagtcatgataggctgggtgcagtggctcatgcctgtaatcccagcacttctggaggccaaggcgggcagatcacttgaggccaggagtttgagaccactctggccaacatggcaaaacgccatttctactaaaaatttgctgggtgtggtggtgtgcacatgtagtcccagatactctggaggctgaagcgtgagaattgcttgcatccaggaggcagaggttgcagggagctgagatcctgccactgccctccagcttgggcaacagagagggactctctttcaaaaaaaaaaaaaaaagtcatgatagctattggacattaacacgagagggtattggattaacctagggaacaagatgaaattggaagcttcaaaaataatgatctctgtctgaaacagaatagtagtaaacaatttaaataaaaaggaacaaggccgggtgtggtggcttacacctgtaatcccagcactttgggaggccaaggcagattgatcataaagtcaggagttcgagaccagcctggccaacatagtgaaacccccgtctctattaaaaatacaaaaaattagctgggcatggtggcgggtgcctgtaatctcagctactccggaagctgaggcaggagagtcgcttgaacctgggaggtggaggttgcagtgagccaagatcgcgccattgcactccagcctgagcgacagtgcaagactccgtctcaaaaaaaaaagaaacaaagtagaaagaaaagacaatgaaaatggttttcttgttgaattgtacatatgtacagagactttttttgcctcattattctttatacctttcatacattgcatatatgtatttgtatctactctgttaataaaatcaatgtttaaaagacaagaggaaatatactaaaatgctaatagtagagatagtgccactaaaggctacgttatagttatttttctttattctttattattttcagtattttttcatatatataacatatagctttaggggtacaagtggttttgggttacatagtagatgaattatatagttggtgaagtctggacttttaatgtgcccatcacataaagagtgtacactgtaatcaataggtgatttttaatcccttaccttccgtgtattttccaaatattaaaataagaaagcattacttttggcctggcatggtggctcatgcctgtaatcctagcactttggaaggtcgaggtgggcagatcacttgaggtcaggggttcaaaaccagcctggccaatatggtgaaaccctgtctttactaaaaatacaaaaaattagctgggtgtgctagcgggcgcttgtaatcacagctactcaggaggctgaggcaggagaatcacttgaacctgggaggcagaggttgcagtgagccaagattacactctagcctgggtgacagaagagactttgtctcaaaaaaaaaaaaaaaaactttactttttaaatgagaaatttgaaaaacatatgaacacacacagacattatatgaatatataaaaatgcgtgtgtggatagatatagatatatgaggtatctgtatttgcattaaaaagtcttcgaatcattctttttttttttttttaaattgagatagggtctccctctgttgcccaggctggagtatggtggcacaatcatagttcactgcagcctcaaactcccaggctcaaatgatcctcccacttcagcctcctgagttgctgggactgcaggtgtgcaccaccacacccagcaatttttttttttttaatttttatagagacggggactcactatgttgcgtaggctggtctcaaactgctaccaccaatcttacatgtgcttactgaaaataaccccctgcggctgggcgcggtggctcacgcctgtaatctcagcactttgggaggccgaggcgggcagatcacctgaggtcaggagttcaagaccagcctggccaacatggtgaaaccctgtctctactaaaaatacaaaaattagccagtgtggtggtgcatgcttataatcccagctactcaggaggctgaggcaggagaatcgcttgaacctgggaggcggagattgcagtgagccaagattgcgccactgtactccagcttggtggacagagcgagactctgcctttaagaaaaaaaaaaaggggcgggcgcggtgacttatgcctgtaatctcagcactttgagaggctgaggcaggtggatcacgaggtcaggagatcgagaccatcctggctaacacagtgaaaccccgtccctactaaaaatacaaaaaattagctgggcgtggtggcgggtgactgtagtcccagctactcaggaggctgaggcaggagaatggcatgaacccggcaggcggagcttgcagtgagccaagattgcaccactgcactccagcctgggcgacagagcgagactccgtctcaaaaaaaaaaaaaaagttgttttggaacagtctctggaagaataggcaatagcctgtctggatgtggtggttacttttaatctcctctctggtgactaatcttccctggttgtttgatgagatttctaggaagagagtttaagacaattgcatttaatacaattggaagaacttccctcagtcatataagggaaagaacttccgcaactgctccctcctgctctttggaagggaatgatggggacagggagcagaaggtcagagggagaccttgtttctgaggcttatttctgaggcctttcaatctcctttgttcaaagcacccagcatgccaaagcaccatattttggagcatcattttctgagccccaacacttggttggatggaagactggaagaataaaaaaaaaaaacaaaaaaaaaacagtgccacagtgctgacttttctggggaaccttttttttgtttgttttccgagacagggtatgactctgttgcccaggctagagtgcagcagtgtaatcatagctcactgcagccttgacctcccgggtccaagcgatcctggggatccttttgacagctgtcatcaattatttatacctgcaaccttctccagaggagtgtctttgggtgatcgaagtcacctcgtttggaggtgtctggaagttaagtcatcacccggagccaatggagtaggaagcctccatgaagctggaaggcaggtccagatttctggcctagtgaccactagttagatggtggagggactaagagacacagagtggaggatcagatttgttaggggcagcagtagaggctggttctttctttctcgctcattatttattatttttcgagacagggtctcattctctcacccaagctggagtgaggtggcatcatcacagcacactgcagcctcaacctcctgggctcaagcaaccctctcatctcagcatccagagtaggtaggactataggcatgtgccaccacacccagttaatctctcactttttcaaaacagagtttgagagcttaaataactttctacctcactggctcctccttctctctcctttgcagttttactattacaaaaaaaaaaaaaaagtctgggtgtggtggctcatgcctgtaatcccagcattttgggaggccgaggcaggcggatcacctgaggttgggagttcgagaccagcctgaccaacatggagaaaccccgtctctactaaaaatagaaaattagccgggcgtggtggtgcatgcctgtaatcccagctactcgggaggctgaggcaggagaatcgctttaactcgggaggcggaggttgcagtagccgagatggcaccactgcacaccagcctgggcgacagagtgagactccatctcaaaaataaataaaataaaataattacataaataaaaaagagtgttgctgtgtattatttgggtgatttgaatttatttatttttatcattattttttgagatggagtttcactcttgttgcccaggctggagtacaatggcgcaatctcagctcacctcaacctctgcctcccggattcgagcaattctcctgcctcagcctcccgagtagctggaactacaggcgcccaccaccacctggctaagttttttatttttagtagagatggggtttcgtcatgttggccaggctggtctcgaactcctgacctcaggtgatccacccacctcagcctcctaaagtgctgggattacaagcgtgagccaccgcacccagctaacattctttttttttttaattaaagactcaaattatctatcctttctctgtataaatccagtttaacttctcccctctgaatttcccattcttgttagtttgttatgaatttttccataactttctctctatatatatatccacataggagaggcagtccaaggcaatggttaggggattggtctctggagtaggccttcctgggctcaaatcttgattttgtcaccacaaaagctgtatgatctcagataaattgtctaatctttttaagcctcaatttctacaatctataaaatgggtgtggtaacattaactatctcatagggttattgttaggatatatgagttaatatgtgtaaaatacttctaatagtggttagcatgtggtaagtactaatggttacttatacacacccatgggaaaagtggaacattattttgagtattttaaaaacataatgatgtcataatgaatttatgtcaatcagcaattcatttttttgagacggagtttcactcttgttgcccaggctggagtgcagtggcgcgatctcagctcactgcaacctccgcctcccgggttgaagtgattctcctgcctcagcctcctgagtggtgggattacaggcgcccaccaccacgcctggctaattttgtatttttagtagacaccgggtttcaccatgttggccaggctggtcccaaactcttgacctcaggtgatccacctgcctcagcctcccaaggtgctgggattacatgcatgagccaccgcgcccagccatgcaattcattttttttaactcaaaaatatatctcaaagatcctctcctgtcagtccagatccatggaacttttttaaactgctgcttagtgttccattctgtaggcagttgattgaaatattcctcgatttgtgaaaatttaggtggtttccaatttcttacaactacattgcaatgaactactaattgatttccttatttccactcttgttcccttccctcgatgataactgaaattgtgaacagagtggaccagatgtgtctatccttctttccagccctgaaattctgcttcagtgattcagaccacatagtctcccattcacagagaacgagaacttgaagctcagcctaacataagcaggtaaaatgataggagaggaaactcttggaccaggcttacctcctgttcatttggaaggaattgggaagctcttgcatacatcctggcctcctggcattgcctcattcattcatttattcattcagtcagttaccttctgcctagtagtccccagacaacaatagttctgatgcttcttccttcctaatataaggcaaactacctttacccccaccttgacccaagcctgtctactccattgttggcaggcacatgcctggttgttgggtgatgtgggtgctgaaagtgggacagtcacagcccaggcagacccctgccctccctttgccccaccatctatccagctcctgcctttctccttgtattgccatccacacttcagggcctcgcgagcaaatggttttgcatttatcacctgctaatacactagatcatttacttatttatctcatctggcatctgtcttctcccctagaataacagttccacgaggacaggaattttgtctgtctttttactgtggtatccccacacttagtatggtgacttggcacatagcaggtgctcaataaatgctgcagcaactgggcatttgtgtgactggatgagtgttatctcttggaatgaaacctagaaatggaagtcctacatcatagggcatacttatttgacattttaatagttgtcaataggctgagcgcagtggctcacacctgtaatctctgcattttgggaggctgaggcgggcagatcacctgtggtcaggagttccaaaccagcctggccaacatggtgaaaccccgtctctactaaaaactaaaaaattagctgggcgtcatagtgggtgcctgtaatcccagctactcaggaggctgatgcaggagaatcacttcccggaagggggaggttcagtgagccgagatcacgccattgcactccagcctgggtgaaagagcgaaattttgtctcaaaaaaaaaaaaaattaaaaaattagccgggcatgctgtgaggtgcttgtaatcccagctactcagggaggctgaggcacaagaattgtttgaacccaggagtcagaagttgtagtgagctgagattgtgccactacatgccagcctgagcgacagacagagactctgtctcaaaaaaaaaaaaaatagttgtcaatagttgtccacacccatctatactcctacctgctgagttaccttacaaatttctgatactatcaaacttttaattttggttaatctgatgggtgaaaaatggaactttcttgtttcaatttcctttattatagtgaggctgagcaccttcatgtgtttgatggccagttttgtttcttcttttttttagtggagggttgggggacaggatcttgctctgtctcccaggctggagtgtagtggcctgatttcagctcactgcaacctccaccttccaggttcagacgatcttcccacctcagcctctggagtagctgggactacaggtgagtaccaccatgcccagctaatttttgtttttgtttgtttgttttttttgagacagagtctcactctgtcacccaggatggagtgcaatggcatggtcttggctcactgcaacctctgcctcctgggttcaagcgattctcctgcctcagcctcctgagtagctgggactacaggtgcgtaccaccatacctggctaatttttgtattttttgtagagacggggtttcattatgttggccaggctggtctcaaactcctgacctcgtgaccccccctcctcagcctcccaaagtgctgggattacaggcatgagccactgtgccaggcctattaagttttgtattttttgtagagaaggggttttgccatgttgcccaggctggtctcgaactcctgacctcaagtgatctgcccccgccccccacccccggcctcctgaagtgctgggattacaggcgtgagccactgcgcctggcctactaaattctgatatacatgagttctggattttgtttttgtttttaaagacaggacccagctctgtcgcccaggctggagaatcatggctcgctgcagccttgacctcccaagctcaagtgatcctcatacctcagcttcttgagtagctgggactacaggtacgcaccacctcacctggctaattttaaaagttttttgtatcttgccatgttgtccaggctgatttcaaactcctggctcaagcaatcttcccgcctctgctttccaaagtgctaagattacaggcatgagccaccataactggctgagtgtgtttctggactcttaaactcttctactgatttcccccacttttaacttctacgacaataccatacttaaaaatacctttatttatttatttatttttgagatggagtttcactcttgttgcccaggctggagtgcaatggcgcgatcctggctcaccacaacctccacctcccgggttcaagcgattctcctgcctcagactcccgagtagctgggattacaggcgcctgccaccatgcccggttaattttctatttttagtagagacggggtttctccatgttggtcaggctggtctggaactcccgacctgaggtgatctggccgccttggcctcccaaagtgctgggattacaggcatgagtcactgtgcccagcaaaaatactttttttttttttgagacggagtcttgctcagtcacccaggctggagtgcagtggcgcgatcttggctcactgcaagctccgcctcccgggttcatgccattcttctgcctcagcctcccaagtagctgggactacaggcacccgccaccatgcccggctaattttttttgtatttttagtagagacagggtttcaccgtgttagccaggatggtctcagtctcctgacctcgtgatccacccgcctcggtctcccaaagtgctgggattacaggcgtgagccaccgcgccaggccaaaaatacctctttttagacaaggtgccatggctcatgcctgtaatcccagcactgtgggaggctgaggtgggaagatcacttgagtctgggaggttggggttggagtgagccgtgatcctgccactgcactccagcctgggtgacagcaagaccctatctcaaaataacaaaacaaccaccacaacaactaccactcccccatccctttgtttttgaggtagagtcttgctctgtcgcccaggctggagtgcaatggcaccatcttggctcactgcaacctctgcctcctgggtttaagtgattctcctgcctcagccttccaagtagcaccaggcaaccaccccattttaattgtggaaaatttcaaactcatacaagagtatatgtatgtatttatgtatcatgaacccatcaccaggttcaacaattatcaatttgtagctaatcttgtttcatctaaatccccacctacttatcttcactgcctactcccaattatttggaagccagtgccagagtaatttcatccctaccgtatctatatgtatctctacaacacaaggactcttaaaaaagaaaacaaaaggtgtggtggctcacacctgtagtcccagcacttgggagggtgaggcgggggcatcacccgaggtcaggtgttcgagactagcctggtcaacatggtgaaaccccgtctctatcaaaaaatataaaaattagccgggtgtggtggcgcatttttaatcccgggtacttgggaggctgaggcaggagaaaccgggaggcggaggttgcagtgagctgagatcacaccgttgcactccagcctgggctacaagaacgaaactccgtctcaaaaaacaaaatgaaacaaaacaacaacaacaaaaagaaaacaaaaccaaactctggcagtttatgttttgaaggaactaaattgtcctgtggttttcctgtctggattttgccgattgcacccccatgggtgtgaattaactgaaccatactttaaaaattactataatttcatgttaatatgtacaaaatctgtacataaatcccccaatctttttcaaaattcaagatgccagtacttgtactcttccataggaactttagaattaacttggcaaattccagaacagaacccactgggactttcattggaattgccttgacctttttttttttgttttgagacagagtctcgctctgttgcccaggctggagtgcagtggtgcaatcttggctcactgcaacctccgcctcctgggttcaagtgattctcctgcctcaacctcccaagtagctgtgattacaggcacgcgcgagcacgcccggctaatttttgtatttttagtagagatgggggggggtttcaacattttggccaggctggtctcgaactcatcgcctcaagtgatctgcctgtctcggcctcccaaagtgctgggattacatgcgtgagctaccgcacccagcctaggcttaatttttgaatctttagcttttgctggtattatgaagggggttgttttgttgttcttgttgctgctattttctaattgattaaaaaaaattaagatggtgggggtggtctcgttatgatgtctacgctgttctggaactcttggtctcaagggatccttctgctttagcctcctgtggagctgggattataggtgagcgccacgaagcccggcctctaattaattatcggtggtgtataaaaagaacagaccttcttaattcgaatcccatcttctccatttattatgtgattttggacatgtttgttcaacttctcctagactttgttttctttttacgacatggggatcataaagccgggatgcagttgggaataaaaccggataaagctcccaacgaaccgcgggtttcataagatcagggcagggactgggtaaaaggtttcaaagactcctgcactattgggaaggacgctacgggcgagtctatgttgcatgcaggcgactccatgttaagacgaagtgaactccctgaaccttcaagggataatgcacaaccataacgagaataatttttaaaaatagagttttcttccctgaaaacttggagaggtccaggatgcgcgccattctgtgatctaggttgactctccacctcttcagttggtaccacctttcccaaatagtttggagcagagcactccggtctttgtaataacgtactcctaagagctgttccagtggactcacgcaggcgcaggagactacacttcccaggaactccgggccgcgttgttcgctggtacctccttctgacttccggtattgctgcggtctgtagggccaatcgggagcctggaattgctttcccggcgctctgattggtgcattcgactaggctgcctgggttcaaaatttcaacgatactgaatgagtcccgcggcgggttggctcgcgcttcgttgtcagatctgaggcgaggctaggtgagccgtgggaagaaaagagggagcagctagggcgcgggtctccctcctcccggagtttggaacggctgaagttcaccttccagcccctagcgccgttcgcgccgctaggcctggcttctgaggcggttgcggtgctcggtcgccgcctaggcggggcagggtgcgagcaggggcttcgggccacgcttctcttggcgacaggattttgctgtgaagtccgtccgggaaacggaggaaaaaaagagttgcgggaggctgtcggctaataacggtaacgataattattgttattaccatgctaacaggttataaacattgactgaactaagcaccctgcatgcccgttctcatttaatttcctcgccaagccaatgtagttggtgctattcttggtccctcttgacagaaactgaggaaggaggaaggaggaggaaactgaggcccagaatctagataaatttcgagaaatgggtgatacagtagccatgccctcaggaagtgtggcgtttgatggaggaaaacagaggtagtcacaaataagtacatttcaaaactgttgtctaaaacaggaagataattagatggtgtgagaacataattgagggagagtttaagtccacttggagttgtcttctatttgggatttaaaattcattatatgttatccatatttgtccagctctctttttgtatggaatcaccagatattattccctttctcatttcctttctcaacatttatagattggaggggggaaggaaaaccaaaccaggttataatgtagaattggtttaccccctattttcttgacatataacgtctggttttccacatataattttctagtagttcagtaacatggactccccccaaatcaggcctacttaggatagaagaggatttttgactcctggattttgctttaagaccagctcttggtttacttcctgcttcacccttaccttttcttgacatcctgtggcctctctttgaatttctctcactcatcaaatgttgtcaaaaataggactacttgctgctgtagtaaggatattcttgtattgtggccttagtgtattacatcacccccacgtcagacttgagtccccctggttggtttgggtgagtcagttcagtattaagctggcattcttggatcaaaattatgtggctgtcagctaactcagccatttagttgacctttgagggtactgtgctcagattggcatgagatattatgggtgtacagatatatgatgtactcaaacgttttttggtatgtttggggacaaaaacatggtttgaaattggcaagtgagaatcagagcaagataggacaccatctgggtgctctactgttttgtattctaggtgtctggacaatttagaggtgagggagttcaagagccagtttgtgtttctgtgcttcacaaagccacccttgtctaattcttgataaccagagtttggttagacagggactgaaacaatcctagtgcataggaatcacccactaaatacctgttgaattgagtaggcaggaaggcactatctgaattgactacaaaattgcgggtatgaaaaactggattgtattcaactaggttggtaaatttgtttagactttcaaattatctgaatagggtttatttggccaaccttatgcataaatctgtgtattccaaccttgataaaattaatttattgcaattaagtttgtccaggattatgtgagagagtccttcatttcatttctttagttaccaggagatgttcagggctcatctacatctcctggttaattttccttcagctttttctgtgtctcttccctaattctctttgagttcctgggagaaagaggagggatatttaaatgccctttgacatacttaattttctttgctatgggcaaagttaggaagcaaaattgactatagagttgttttttttgtttttgtttttgttttttttttttgagacggagtctcactctgtcgcccaggctggagtgcagtggcgcgatttcagctcactgcaacttctgcctcccctgttcaagcaattctcctacctcagtctcttgagtagctgggattatagggatctgccaccacacccggctaatttttgtattttttttttgagatggcatctcactttgttacctaggctggagtgcaatggtgcgctctcggctcactgcaacctccgcctcctgggttcaagcaattctcctgcctcagcctcccaagtagctgggactacaggcgcatgccaccacacccggctagtttttttgtatttttaatagagatggggtttcaccatgttagccaggatggtctcaatctcctgacctcgtaatctgcctgcctcggcctcccaaagtgctgggattacaggtgtgagccactgtgcctggcctaatttttgtatttttagtagatacagggtttcaccacgttggccaggctagtctcaaactccttatctcaggtgatccacctgcctcggcctcccaaagtgctgggattacaggtgtgagccaccttgcctggccttagagagatttcataacccaagcgattctgtgaatagatctgtatttgagacagagatgtagagatcagcagcccaaggtactctgtgaaaaaaggatagataactgcggagggcttccgtttttgtttgtgtagggaaacttggtaaaaggggaataaagaacagtgagaaaagtataaaattgtatctagaggttactttggaaattaaaaataatgttatttgtacttagtaaaacaaagtagtaaaagtttgctctttttttttttttttttttgagacagtctcactgtgttgctcaggctggagtgcactggctggcgcaatcttggctcactgaagcttccgcttcccaggttcaagcgattctcctgcctcagtgtcccgagtagctgggattgcaggcgtgcaccaccatgcctggctaatttttgtatttttagtagagatggggtttcaccatgttggccaggctggtcttgaactcctgacctcaagtgatccacctgccttggcctcccaaagtgctgggattataggcgtgagccactgctcccggcctgttaacccttttttactacagagaacttggaacctgtttcatcacttttctgcttcttccaggttcttgatacatatttgccagacttcaagatttcagaaaaggggtgaaagagaagattgcaactttgagtcagacctgtaggcctgatagactgattaaaccacaggtaaggcagtgaccataggaataaggaacattaatatatcagcttcataagtgtttaaatgactaatgtaattttataaagtaacacatattttggaaggaaatttatttattatgaaaagcaaaaagaaaataaaatcacccactatcccacctctcagataaaccatggttagccttttgatagatttctttataatttttttctatgtctatatagtcattccttgatatccatggggaattggttctaagaccttcccaggatatcaaaattctcatatgcggccggttactgtggcttatgtctgtaatcccagcactttgggaggctgaggcaggcggatcacctgaggtcaagagtttgaaaccggctggccaacatggcaaaaccccatctctactaaaaatacaaaaattagctgggtgtggtggtgcgcatctgtaatctcagctacttgggagactgaggcaggagaatcccttgaacccgggaggcagaggctgcaagtgagccaagatctcatcactgcactccagccagcaagactctgtctcaaaacaaacaaaacaaaattctcagatgctcaagccctggtataaaatgatgtgtagtatttgcatatagcttatgtacatactcccacatactttaaattatctctagattacttataatacttaatacaatgtaaatgctatgtaaatagttgttatactgtattgtttagggaataatgacaagaaaaaaagtctaggctgggtacagtggctcaggcctgtaatcccaccactttgggagacttaaataggaggattgcttgaggccaggagttcgcgaccagcctgggcaacatagtggcaccgtgtctctacaaaaaaaataaaacataaaaaaatttaaccgggcgtggtggcacctacttgtagtcccagctacttggggggccaaggtgaagggtcacttaagccaaggagtttgaggttacggtgagctgagggcaccactgcactccaacctgggtggcagaaagagaccctgtctcaaaaaaagtctgtacatatgcagtacagatgcagtttttttttttttttttgaggcagagtttcgctcttgttgcccaggctggagtgcaatggtgcaatctcagcttaccgtaacctccgcctcccaggttcaggcgattctcctgtctcagcctcccgagtagctgggactacaggcatgccacacctggctaattttgtatttttaacagagatggggtttctccatgttggtcaggctggtctcgaactcctgacttcaggtgatctgcccgcctctgcctcccaaagtgctaggattacaggcgtgagccaccgtgcctggccttgcagttttttttcccccaaatatttttgatctgcagttgattgaatccacagatatggaactcatagatacggacagccaactgtatttcatttttaaaaaaatcatacactaaaaacttttgttaatttttttaacttttttttttttttttttttgagtcggagtctcactctgtcgcccgggttggagtgcaatggcgcgatctctggctcaatgcaacctccgcctcccaggttcaagcaattctcctgcctcagcctcccgagtagctgggattacaggcacccgcaaccacacccggctatttttgtgtttttagtagagacggtttcaccatattggccaggctggtctcaaactcctgacctcatgatctgcccacctcggcctcccaaagtgctgggattgaggcttgagccaccacgcccggcctctaatttttttaacttaataatcaggctatgaatattttcccgtgtcattaataaattttcttctcttttcttttttgttttttttgagacagggtcttgctctgtcacccaggctggagtgtgcacttcagtggcgtgatcacagctcactgcagcctccatctcctgggctcaagtgatcttcctgccttagcctctcgagttgctgaaactacaggtgcatgccactgtacctggccaaatttttctacaacataattttaatggctatatggtattccattatttggttctttatattacttttaccagtgaaattgctggtctaaaagaatgcgtatttttggccgggcgcggtggctcacgcctgtaatcccagcactctgaggaggctgaggcgggcagatcacctgaggtcaggagttcaagaccagcctggctaacatggtgaaaccctgtctctactaaaaatacacaaattagccaggcatgatgacgggtgcctgtaatcccacttactcgggaggctgaggtggaagaatcacttgaacctgggaggtggaggttgcagtgagccgagatcgcgccattgcactactgcagcctaggcaacagcgagactccatctcaaaaaacaaacaaacaaaacatatttttaaaaacttttgacatgtaacaccaaattgccttgtaggaagattatgctgatttacctaaaacagtatatattcacataggcataaatgtataacttaaaataggtaatatatttgcatggtgcaaaaatcaaaagaatataaaaagcttcatggtttaaaatcttcctccagccttgttacttcttcactctcaccatccataggtaaacacttttttttttttttttttggagacagagtctcactctgtcaaccaggctggaatacagtggcacaatctcagcttactgcaacctctgcctccctggttcaagtgattctcctgcctcagcctcccgagtagctaggattacaggcacgccaccacacctggctaatttttgtatttttattagagatggggttttgccatattggccaggctggtcttgaactcctgacctcaggtgatccacctgccttggcctcccagagtgctgggattacaggcatgagccatctaataaacacttttattaggttcttgggtttgagtgtttgtgtgttattccccaaaccagataccttttgaagggaataaatctctataaaatgaaatgactgctatttgactaggattgtaatctgcagccacactgtcaaccattacaaactttttcagcttcatactattggaatatcagattactttgggtttctactaagatttccttttagtattttacaaagctctctgtcattatctgtcctagtagtaaacagcatcattgatttccatctaggtcctattagtcataggtggattatggtttgttgagttctatggataaattatagcaaaactgagtttgtaatccttaaaaaagggcaatatgaaacatacaagtttgggagagaaatgataggaaatatatttgcttgaagtttctggacagtgatgaattagaacaagtgtccatgtgtcctgtgctgacttctgagtgttggacagtgagggattgtcattggattttaaattgacccaattttggaagcttcatagatctgtttctgtaaacagatccaatttcaacatagaagttagcaaacataaatgtggaaacacaaagtccattaaacttccttcagacttagtttgtgactttgattaacagttaaaattgcatgctggattatgttgccatttactgactgctgctaatcccttatatacaagaaaaaaatgtaggtgttttctctctgggtaagatgaaagtaactccactctattttacttgtggtaatgtaacaggatctcttatcccttgtgaaagtaggagaggatgtccctggagaaatggcactgcctgggatgggaccatcttaactaactatacttctaatgaagtcttgtcttactctgtttattctattatattaccagtttaactcatgactttctctttaatagaaataggcaagtcatatctcactgactggatagcaaggtgtttgagagcatctgtcacaccaaagtctttgttttgctcaggagctggtagtcccctatttcaccctgcttagaatgcaccctcttgcagctttccccaacccggtctgaacctgcaccttttgatttatagagcttgtcaagactagttatttttggtttgagagtgaagaaagatgggaggcaatgggaggttaatttcagatgaatgtgggaacaggttacattgctttgtctgcaatcttcctaatttgtatttgtcttccccttccatttatctcttaccctagaaaaagtcaacgttcattcttagcttgtagaactccgcaggtctgtctgtatcttttaagtattttttacatcaggaaaccatctctgatcctcttttatgctgttctccttctctgcacttccagagcgctctctgttaatgccctcttgcagcaaggatagccctatattgtaattgtttgcattcccccattcaattgtgcgttcttggagggaagagatttttttttgttgttgttgtttgagaaggagtctcgctctgtcccaggctggagtgcagcggtgcaatctcggctcactgcagcctccacctcctgggttcaagctattttcctgcctcagcctcccgagtagctgggattaaaggcacgtacccaccacgcccgctaatttttgtatttttagtagagacgggtttcaccatgttggcctggctgatctcgaactcctgacttcgtgatccgcctgccttggcctcccaaagtactgggattacaggcataagtcactgtgcccggccgagattttatatctctatctctgtctgtctgtctgtctgtctgtctatctatctatctatctatcgttttagtcttcgctttttggaaacaaaaatgggctataagacacgatggatggcattgaataggcagtttttagaggaacctaattggttcatagcatacaggataggctttttccttgggtctttgtaggaatattggtcattaatagctatttttccatgcagaatatttctagttttgcaagaatctgaagctgtggtagattcagataattttgaaatgtgaagctgattctcttgcttggcaacttgatttgtttgggggaatgtggttgacgcatgtgccttttttttttttttttttttggtgagacctgttgacagaaattcaatcttgattaagggacgcaggaaggcatccagttcccaccatgcctggggctctctcatttaaacagctgcctttggctctggcctgttccatttcccactaggccctgtggactttaattttggaagatttcacatcctcatatttattatttctgggggaggtagtgtcgtgaaaccgaaattacccagtagttagcttttcgttttcttgatgtacttgtcctatcagccttaattgaagagagtcagacttctcaatggatatgtatttatttattctctttttccagggagaggggatggtctcctgagttggccattctagaccaaaatatagcttaaaagaagcttttttaaagaacaggtcatgttaggaaaataatattttgtttttaaaatttcacctaaagattaagtgtacttaggtttgcacccctcgccgtttgttccccactaatcaaatgtagtcttagacctcagaggacagcctttcttctgctgcttgaaccctcttcatagtctctttactctagaatatcactgaggttttcactaaccaccatcttatatagaggaaaaacttcatatggaaaagtatacttaaaaaaagaggaatcaatggattttttaaaaaatttatgggaagattcagatcagagctttccaaatatatttataacaggatttgtaatttgctaaagttttctttatgagcatatcagggatgcttagttttcataaagggcaggatttgtctttgttgaacaggatcttatgatttgattacctacctcctttttgaagcaatgtttataggaaaacttgtgcattagagagaccccagattttggaatcctgcagacttgttcttttaaaactcaacactgctatgtattagtttggtgatcttggaatagtgtaacttctctgagcttgtttccttgtttataaaatggtgatggtagcatttatttataaagacatctatctattgtctatattgttaatgcagtttaaacgagatgatttatgtgaagtgtctggtaaggtgcctggcctacagtagacagtatttggaagttattatctcttgctccatgacatttgttatttatctatttaaatgtgaatttttttttttttttttgagacagagtcttgctttgttgcccaggctggagtgcagtggcgcgatctcggctcactgcaacctccgcctcctgggttcacgccattctcctgcctcagcctcccgagtagctgggactacaggcatccaccaccacgcctggctaatttttttgtatttttagtagagacggggtttcactgtgttagccaggatggtctcaatctcttgacctcatgatccacccgcctcggcctcccaaagtgctgggattacaggcgtgagccaccgcgcccagcttaaatgtctatttttaaataaataggcagtggataagaacaccaccttcggtgtctattccatttggaatcctggctttactgcttcttagctgcatgactgtgaataagtagtaaatctctctgtgcctcaagtccctcagtatagaatgaagataataacagtacctactttataggattattgtgaggatttagtgagttaatacatgtaagacactgtcaacagtgtctggcatgtcataagtgctcattaagtaatagctgttggccgggcacggtggcttacgctagtaatcccagcagtttgggaggctgaggcgggtggatcacttgaggtcaggagttcaagaccagcctggccaacatggtgaaaccccgtctactaaaaatacaaaaaattagttgggcatggtggcaggtgcctgtaatcccagctactcaggaggctgaggcaggagaatcacatgaacccgtgagccagaggttgcagtgagccaagattgtgccactgcattccagcctgggcgacaagagtgaaactctgtctcaaaaaaaaagaaaaaagttaatagctgtttttatttttaactttttcaaatttatatacccttttattaagtcaatgccccaggaatcatttttagttctatatagaaatcttattatttgtttatttttaattttttaaattaattattattatatttttgagatggagtcttactctgttgccaggctggagtgcagtggcacgatcttggctcactggaacctcctcctcccgggttcaagctattctcctgcctctgcctcccgagtagctgggactacaggcgcatgccacgatgcccagctaattttgtgtttttagtagagacagggtttcaccatgttggccaggatggtctcgatttcttttttttttttgagacggagtttcgctcttgttgccccggctggagtgcgatggtgcgatcttggctcactgcaacctccaccccccaggttcaagcaattctcctgcctcagtctcccaagtagctgggattacaggcatgcaccaccacacctggctaattttatatttttagtagagacagggtttctccattttgaggctggtctcgaactcctgacctcaggcgatccgcccgccttggcctcccaaagtgctgggattacaggtgtgagccaccgtgcccggctatttatttatttatttatttatttatttatttatttatttatgagacggagtctcacactggagtgcagtggcatgatctcggctcactgcaacctctgcctcctgcattcaagcgattctcctgcctcagcctcccgagtagctgggattacaggcatgtgccaccaaactcagctaatttttgtatttttagtagaaagatggggtttcaccatgttggccaggttggtagttctatatagaaatattagaaagagaatatgtaacatttgggtaagttaatagtcaatttataggccacgtaaatgggaaggattatttccttaaatcaagagattagacaatcattgcttgtcatgaatatttaataaaaatttgagaaagctcagtttcttttgggctgcaaacatagatctagggaaataaatactgcttaactattttgttgttgttgttgttgttgtcttttaagagacagagtctcactctgttgcccacgttagagtgcagtggtgcaatcgtgggtcactgtggcctcaaactcctggactcaaatgatcctcccacctcagcctcctgattagctgggactacaggcacacaccaccatgcccagctacttaggaggggttgaggagggaggatcctttgggcccaggagttcgagtctagcctgagcaacaggctagattctttaaaaaacagagatgaaaaagaaagaaaaaaaggatgtgaagggttaaatttgaacactttccaggtagttttcagcatcatgctttggtggaatcatggttttgaggctaagtggggttgctgcatgttacattcctgcctcttccttcccccagctttagtcgtcttcattacattcatgcctgggaagccttcccagtgacctgagttaggcattaagatcatgggaatccaagattttcccatgtcttctagcatatttgttcacaagaaaaggaaaatttcctccttgcagcaaggggtttttaaccactgtcagtaccatggaatctttcactaaaaatcctttgaatagaaatgtggtcaaggagaggaaaggtatcagcagtgataataccttacaatagtgtatttcatagcacttgaagtagcttcttatttgattatggtaagaaggtaggcagagaattagtgacttgcctattgtcatatacatgtggtaaatgccagagagggcattctggacttctgttagttggaattgcttttgactacaggtgacagaaaatgtggctataatggtttatacaataattattattattttctgagatgaagtctcactcttgtcacccaggctggagtgcaatggcgcaatctcagctcactgcaaccttcgcctcctgggttcaagtgattctcctgcctcagcctcccgagtagctgggattacaggcacctgccaccacacctggctaatttttatatttttattagagacagggtttcaccatgttggtgaggctggtctcgaactcctgacctcaggtgatccgcctgccttggccttccaaagtgttgggattacaggtgtgagctaccgtgcctggcctatttttttttagtataagaagtctttttagcaggtcatggaaaattgtaaaaaacaccagaagtctagaggtatatagtagctgatatttgatctttaatagtcattagctcattgatgttaagccctatgtttattgttctcttggccatctactcatgtataccagatgactgccatagctccagcttgccttcaaggcaagaagaaggataaagggaaagggcaggaataagggctatagctgttttcaggaaagaaaattttttcctaggaatccctcagcagattcttacttagttctcattggccagaactgtcccatggctaccccaagcttggaaagtggctatcaggaggtaacttccattttaatgtacttgctactgttttggtcatggtcaatgaaaaatatttaatcgtaccttgacttcagccatgttaatttctaattctctatacttagagttcatactgtataatttaaacaaactgtcttatttattgtgtatgataggaccttagcgtctatgtagatgttaagttcctttgtgttcaggactacatctacttttttttctttttttttgagacggagtctcgcactgttgcccaggctggatgcggtggcgtgatctcggctcactgcaagctctgcctcccgggttcacaccattctcctgccttagcctcctgagtagctaggactataggtgaccgccaccatgcctggctaattctttttgtatttttagtagagacggggtttcaccatgttagccaggatggtctcaatctcctcaccctgtgatccacctgtctcggcctcccaaagtgctgaggttacaggtgcgagccactgagcctggccgcttagatctactttttgtgtgaagatatagagtgtcatccttgaatgttactgagaaacattcaagggcacacagcttatggcccctagcaagtacacactattgtgaaccactgacaaaaagcttattgagttaagcttaataatgaaagtagaaatggaggagagaggaaaatttagactggggataccaaagaacccctattccagacagaagactatggagaatggatttacttggaaataaatacagtattcttttctatgcaaatagcttaacttcatgaacacccttctttaattcacaaggtaagagggcagaaggatgtagaaagaacattgtgctgaagtcacgagcctcaggtccagatctggctctgtttttacgtaactgtgtgatactgggcaagtcatttaatctttctgatcttcagcttctaggttgggaataattgctgctttacaggattgttttgcatatcagaaagaatacatatttagtatatcatggcacctggcatgtaatgaacacctctggtaactgtttttaccatgatccttaggatttttgttgtgtgatcttggagaacccctttttgctttaagttaatatcttatagactgcaaaggttaggtgttaatcaaagtttcctcccaattctaaaatatcatgtttctacactaagtacctcaattagagcattgttataaagatacttgtggaattctggctgcagtgagcataggagagaccatgggaagatgatgttctctggggtctagattgatgtcactgtataaatgaaatatttgttataacagatgtttctggccgggtgcggttgctcatgcctgtaatcccagcactttgggtggccgaggcaggcagatcacctgaggtcaggagttcaagaccagcctggccaacatggtgaaaccccatctctactaaaaatagaaaaattagccaggcgtggtggcgcacgcttgtaaccccagctacttgggaggctgagggaagagaatcgcttgaacccaggaggtggaggttgcagtgaaccaagatcatgccactgcactccagcctgggcgacagagcaagacaccatctcaaacaaaacaaaacaaaaacaacaacaataacagatgtttctgagacactataaggaccagaagtacattatttttatttattttattttttgagacagagtctcgctctgtctcccaggctggagtgcagtggtgcggtcttggctcactgcagcctcccgggttgaagtgattctcaccgagtagctggaactacaggtgcagccaccaccccaggctaatttttgtattttcagtagagatggagtttcaccatgttggccaggctgttctcgaattcctgacctcaagtgatcctcccgccgcgtcctcccaaagtgctgggattacaggcatgagccaccactctcagcccctagtccattttgaattgccctagtccactgagagaagctgtgaaatgctggccaaaccactgaacggctatgtaggttgggagtaactaatctcatgattcatctcagtggatagcttatgtggtatagtttagagaaaatgagtgctgcagtgcccagagttggggagagtttggggaactggcacactcctggtaatgtaagtgggtgtttttttcttctgagggacattttcacagtatgtgtcaagagcttttgacccagcagttccacctcttaagatttatcttaagggaagaattatggatgtgtacagaaatttagctacaaggatgatgctttagcagtatctttaaagtgaaaatattggaaaaaggctgaaaatcaaggataagtaattatggaacagatacagccattaattgatatgtctatatttattgacatacaagaatattcataatatgtgaagcagattcaaactgtcaatgattcatttaaaaaaataatagtttgtatatatatgagggagaagacatctggaatagtgtagcattataggtttatttatttatttatttttgagccggagtctcgctcttgtcacccaggctggagtagagtggcgtgatcttggctcactgcaacctccgctgcctgcgttcaagggattcttatgcctcagcctcctgagtagctgggattacaggtgcccaccactgcgcctggctaattttttgtatttttagtagagacagggtttcaccattttagccatgatggttttgatctcctgacctcgtgatccacccgccttggcctcccaaagtgctgggattacaggcgtgagccaccgtgcccggccgcttttttgtatttttagtagagatggggtttcaccatgttggccaggctggtctcaaactcctgacctcaggtgatccatccgccctggcctctcaaagtgctgggattacaggcatgagccactgcgccacactagaaaggtattaatttaaataaacatttattcaagtgattactggcatctacctcccttctaagatacagatacttttaagtacatgtcgttccctggataaaaacaaatggctggccgggcgcggtggctcacacttgggaggccgaggtgggtggatcacttgaggtcaggagtttgagaccagcctggccaacatggtgaaatcccgtctctactgaaaacaaaaaattagcaaggtgtggctgtgggcgcctgtaattccagctactagagactgaggcaggagaattgcttgaacccggaaggcagaggttgtggtgagctgggatcatgccactgcactccagcctgggggacagagtgagactccgtctcaaaaaaaaaaaaaagacaaatggctcattgggtttcattggcaaattattggccactgagtgtggcctttaggctatttatcagattactttcagctattttattaactagattaggcttgagtaggagctgactttaaaccttcacaggtttccacaagatagagtgcaaaacttcgtacgcaggagtagggaggggcctatttaacttgttcccttatccttgcttctgttcctatgctgcatgttgtgactcttacgtgtatttcaaagttgtcgtctttatactcagaaatagtattttttgagaatatttctaagaaaagacaacttatatttgacaaaactgtgttgaactcttactatgtataatgcactgtgttaagcaccttgatggttggatggatggatggatggatgaggtatacacaagtgagtaaaatctatctttgtttttaggaacttcgagtctactgggagagacatttacatagttaatataaaattggatgataagtgttacagtggagatataaacaaagcacaattggctttggagaggcaacaattttgtatgataggtggaaattgggaaagagttcatagagatttgacctggactttgaatgatggataagattttggttggtaggcataaaaattagtggtgtattttagaaattgggttattcagggcagagagagaataaattgggctagaggaggctagaaatgagaaaatggtaaattgagggaaaataatgacatggtgaatgtaaaacacctagcacagtgtagatacttatcaaactttgcctcttttaaaaaacatttagaaaatttatttatttattttatttttatttattattattttttttgagacagagttttgctcttcttgcccaggctggaatgcaatggcgcgatctcgactcactgcaactttcacctcccaggttcaagcgattctcctgcctcaccctcccgagtagctagaattacaggcgcctgccaccatgcccagctaattttttgtattttttaagtacagaagaggttttgccatgttggtcgggctgatcttgaactcctgacctcaggtgatccacccgcctcagcctctcgaagtgctgggattacaggcgtgagccactgctcctggcctaaaatttatttttaatttcaattttttctttttggtttttctttatatttgctgattacttaaagataatttttatttttttagagatagggtcaactacttacagataatttttatctttttagagacagggtcaactgttatacttagagataattttaatttatttagagacagggtctgtctatgttttgtaggctggacttggactcctggtctcatgtggtcctccctcctcccaaaatgctgggattacagacgtgagccactgtgtctggcccacttctttctaattccaaacatatctacctcaaggagtatctttaagttacctgaaaaactaatgtttaggttgattggacaaagtaaggctattttcagtaaattctaggtggtttgcaaaattacaaacgtggtagtaaaaccaaagtaatgatgggaatttacttagatttatgtgcaaccatttctttcctcagaaggtgacctgctgagaaaagtggtacaaatactgggaaaaacctgctcttctgcgttaagtgggagacaatgtcacaagttaaaagctcttattcctatgatgccccctcggatttcatcaatttttcatccttggatgatgaaggagatactcaaaacatagattcatggtttggtaagtgcctgctttctctggctattttaaggattagtggcttgctttgtgctgaagacctttcaataatagaaggggttgcaagaaaagaactaaaatatcaacttctttctgcaccaagacattctgtcatccatgatattatgggaataattgaaatgcccagtatttggggaatggattgtaagtacaaagcatatgttgttttgtagttcagaatggcagatttaagctttagggacctatgggaaagttcagatgaaccagtgttcaacaaaactccatgctcaaatatgtctgtagtgatggcagccacataaaaactttgtctactatcattagggatagattatatcacagctaggatattgacattcatacaatctaccagttttactcagatttctccagttttacttgtatgtgtattaagttctctgtggttttatcacctgtgttggtttatgtgtctaccatcacagtcaagatcttttataattaccctcacctccctcctgccacccctccctcaattcattttttttttttttttttttgaggctgtagtctcgctctgttgcccaggctggagtgcagtggtacaatctcagctcactgtaacctccgccactcttgttcaagcggttctgcctcagccgcccaagtagctgggattacaggcgcccaccagcatgcctaactaatttttgtatttttagtagagacagtgttttgccatgttggccaggctagtcttgaacccctgacctcaggtgatccacccacctcagcctcccaaagtgctgggattacaggcgtgagccactgcgcctggccctcaattcatttttaaatggaaggattatgctactaagaacccattcccagaaacagtattgcttggccaatggtaagtaagaatgtggttacatttttacattactttgaaataatatctgagactagttgttgaggcccctttgattctttctctcatgtctccatcctccttatcgggagaaatcactatgaatatgtggtggggaacagaagtgagtccattgcagctgtacttatccgtatagtgcactgtccaaatgtgttgacaggtgccattttttggaaaaggactttaatggcatctagtggggatcctgagaggagtcgtctgttggaagtggtgtgggaggaagggtaaataaatacaagggccagctgtcctgcggggatcttccccatgcccttgcttcactggaactgtaaggaaatggctgggctgtctgaggatttctttttctaagcttttctttaaaataaaaaagaaaagaaaagattagcctaagaatactgttaaatacaatttggaagaaaaaaaatgaccccactatttttccaaaactaccttagttttaaaacatttttatttttttttctttttgtttttgccagagttcttttggctaacaaaactacctcagttttaatatattactttccaatttctttcccaaataaatagtcacatctttctacacagttgcaatcagaatgtacatgcacagggtagttattgctgtgtctcactgcattcctgaaactatcagtaggctgttggtagaacagacccttcactgctttgtactgacttctgggcacagtagaatctaagataaaatttcttgagagaacctagctctgctctaccctcacacaccccttattcctcccaccaccccactgaggaggaaactctgtaagactatacagtatctcttgtaagccctacagtttttgatggttacagttttctttcgttttttttttttttttttttttgagatggagtcttgctctgtcgccaggctgtagtgcagtggtgcggtctcagcttactgcaaattccaccttccaggttcaagcgattcccctgcctcagcttctcaagtagctgggattaaaggcatgtgccaccacgcctggctaattttttgtattttagtagagacggggtttcaccatgttggccaagacagtctcgatctcctgacctcatgacccacccgcctcggcctcccaaagtgctgggattacaggtgtgagccatcgctcccggctggttacagttttctttaagaggaacatgatatatttagggagtagataaagccagttcatatttgtatgaccctaaatgtgtaccaaacaaagataaggagttattcacaatgcagaatctgtacttttccttttttataatacattgttcaatgttgccagtttttagtgattgttcttatagtctatctcggatgtgtaatgtgtactttttcttttgattgctagaactttgcttgtacttgccacatgagttggaagtgtactggtagggagctttagtttgcattttaaatgcgtgatagtgatttgttttgcttccttgctgatcagacaatgatgatcttcccttttcacagaggagaaggccaatttggagaataagttactggggaagaatggaactggagggctttttcagggcaaaactcctttgagaaaggctaatcttcagcaagctattgtcacacctttgaaaccaggtaagaaaacatcttagaaaaaagctccttgatagaatggtgggacagtgttttagaagcctgaggttctgggaaaattacctaaatgctctatctctttgtttattattggtgaaatgggctaattcatttcatgataaatgtaaaactaatgatgtgctacacttaaaaaaaaatctcttggagcttaagctaacatagaatttttttttttttttctttaagatggggtctggttctgtcacccaggctggtggagtacagtggcacagtcatagctcactgcagcctcaaactcctgagctcttagtaactgggactacaggtgctcaacaccatgcctgactgatttttaaaaaattttagtagaggagtctttgctagccaagctggtcttgacctccgggcttcaagtgatcttcctgcctcaggggcttcccaaagtgctgggattataggtgtgagctactgttcccgggggctaacatagaattttattgccagatacgtaactgttatctttttgtgacaagatttaatgtaacctaacctgggtctgggtgggaaataaaacagcaagaaagaagactgtactgcttgccattgtacaagaattctttgagttatgtatctgattttaaaagatgatggatcgcttctcggccttttggctaagatcaagtgtaaaagatgattgacatttaaactggtgggtactggatctgcagaatattgtctgtttggttagaacataagaagcattctttaagaggtcataaaatccttcttgaaattgattcttttgaaaaaaacagctgtatttagatttaactcacacatcatatgattcacttaagataaacatttcagtgtttttaagtatattcacagagttgtgcaaccatcatcctatcagtttagaacatttgaaaagtattatgtgggtaaatctgaaactggtctccatcacaccatatgactactctcacctccctcctgtcacccctccttcaattaatttttttttttttttttttttgagactggcgtctcaccctgttgtccaggcaggagtgcagtggtatagtctcggctcactgtaacctccaccacctgggttcaagtgattctcctgcctcagctgcccaagtagctgggattacaggcgcccaccagcatgcccggctaatttttgtatttttagtagagacagggtttcaccatattggccaggctggtctcaaactcctgaccttgtgatccgcccacctcggcctcccaaagtgctgggattacaggcgtgagccactgcacccggtcaatatttatctttctatgcctgacttacttcacttaacataatgtccttcaggttcatccatgttgccatgaatgacagaatttcattcttttttatggctaaatagtattccattgtatatatatatgccacattttatctgttcatctgttgatggatacttcagttgattccatatcttgactattgtgaatagtgctgtaataaacataggagtgcacatagatatctcttcgatgtactgatttccttctttttggatatatacccagtagggggattgctggatcatatggtaattatatttttaattttttgaggagcctccatactgttttccataatagctgtactaattgactttactactaacaatatataagagttctcctttctctgcatcctcagggatgcagagaaatttttaatatttttcatagtgtccattctaactgggatgaaaggatatctcattgtgatttttaatttgcatttccctgatgattagtgatgttgagcattttttcacatacctgtttgccatttgtatgtgttcttttgagagatgtctgttcagctcatttgtccggctgttgagttatttgagttccttgtgtattctggatattagtcccttcttgaatgaatagttagcacgtattttctcccattctttagttgtctcttcactctgttgattgtttcctctgctgtgcagaaagttttaaatttaatataatcccatttgtctacttttgcttttgttgcctatacttttgaggtcatgttcataggatctttgcccagaaccgtgtcctaaagtatttcacctatgtttttattttattactttatttatttatttttgagacagagtctcactctgttgcccaggctggagtgcagtagtacgatctcggctcactgcaacctccgcctcccgggttcaagtgatcctcctgccccaacctcccaagtagttgtgactacaggcgcgcaccaccacacccagctaatttttgtatttttagtagagatggggtttcgtgatgtcggtcaggctggtcttgaactcctgacttcaagtgatcctcccacctcggcctcccaaagtgctgggattagagtcatgaaccaccgccctcggcctcccctatgtttttagttgtttcatagtttaaggtcttacatattagtctttaatccattttgagttgatttttgtatatggtaagaaatagatgtctagtttcatttttctgcatttaaatatctagtttgatcagcaccattttttgatttttcaaatttaaattttattttagagatgaggtcttactctattgcctaggcttgtctcagaattcctgggcttaaacaatcctaccacttcagcctcccaaagctagcaccatttattgaaaagactgtccctccaccaaggaatgttcttggtgctgttgtcaaaaatcagttggctataaatacgtggattttttcctgggttctctatcctattccatttgtctgtgtgtctgtttttatgccagtaccatgctgttatggttactatagctttgtaatgtattttgaaggctggtaatttgatgccttcagctttgttctctttgcataggattggtttggctatatggggtcttttgtggttccatgtgaattttaggttttttttcttgagacagagtctcactcttgttgcccaggctggagtgcagtggtgcgatcttggcttactgcaacctccgccccccgggttcaagtgattctcctgcctcagcctctggagtagctgggattacaggcatctgccaccacccctagataatttttgtatttttaatagagatggagtttcaccattttggccaggctggtctcgaactcctgacctcaggtgatctacctgcctcggcctctgaaagtgctgggattacaggcgtgagctactgcgcctgtcctgcttatacattatttatggctgttgtattcttactaatttttctttccatttgttccatcaattagagagagaggtagtgaaatctcagactgtaattatggatttgtctctttatctttataatttttgcttcatatagtttgaagctactattagatgcataaatgtttaggattgttatgtcacgttgatgaattggccactttaatttaatttaaatttaatttaatttaaatttaattttttttttttttttggctggacgtgatacctcatgcctgtaatcccagcactttgggaggctgaggtgggcggatcacaaggtcaggagttcgagaccagcctggccaatatggtgaaaccctgtctctactgaaaaatacaaaaattagccgggtgtggtggtgcgcacctgtagtcccagctactcgggaggctgaggtaggagaatcgctgaaacctgggaggcggaggctgcagtgagccaagatcatgccactgtactccagcctgggcgatagagcaagactccatctcaaaaacaaaaaattatatacatatatatacacacacacatacacacatatatatacacacaagcatatatatatgtacatacatctaatatacatgtatgtgtgtatatatgtacatatacatgtatgtgtacatacatgtacacatacatgtatatgtatatatttttgagacagggtctcactctgtcacccaggctggactgcagtggagcaatcacgcctcactgcagcctctacctcctgggcacaggtgatcctcttacctcagcctcttgagtagctgggaccacagatgccactaccatgcctagctagtttttgtattttttgtagagacagaattttgccatgttgcctaggctggttttgaactcctgggctcaagtgctccacccacctcagccttccaaagttctgggattacaggttgagccactgtgcctggccccactttaacagtttgaaatgatcttctttatccccattgaaattctgtgctctgaaacctactttgcctgatattaatatagccactctagttttcttttgattggttttagcatggtatgtctatatttaaagtgcatttttttgtagacagcatataattgggtcttgctttattatttaatattattgttgctgcattttaattggaataaatgcatctattttagccttgacatgctatgctattattttgtgtgtgcgtgtgagtctctctgccccaaaaatatttctttaggagatgaaccaaatgattgttctctgaaatgaataatgcctaaactatgttttcatggcctatcttttcttccctgtcatcttgttgcagtttaattcctttatcaggagtcagttcatatgctatgtgattaagtgctgtttcttccatgaagcctttacttgtttcttattctgttttgtttttttgtttttgtttttttttttgcagacagggtctcagtgtgtcaccccatctatagagcagtggcatgatcacagctccctgcagccttgacctcctgggctcaagtgatcctcttgcctcagcctcctgagtaactgggactacaggcacattccaccatgtctggctaactttctcagtgttcccataacactttttttctatttcgttaaaaatgtttatcaaggctgggcttgtagttcatgcctgtaatcccagtactttgggaggccaaaatgagaggattgattgaggccaggagtttgagaccagcctgggcaatatactgagacccccatctctatttatataatattgaaaagcaaaaaaaaaaaaaaaaaacgtttatcaaaataaaacatggccatggtaacatggctaacaatacttagagtttatgttaaaataacccctttctcttcccatccctaccccctgtcctttttctcaaactcatattggttttgttgttgttgttgttgtttgtttttatattttgttttacaggtgggatctcactgtgttgcccaagctggtctcaaaatcctgggctcaagtgatcttcctgcctccgtcttcccagtagctgttttaactcactattttaacttgtgctgtggttacattcataatgcctgatagtatgattatatcagcagtatttacaatgttatgattatataaatattgttcaatgccagatcaataactgtgatgcagttgcatcccttcttggtactctttggctatctttggttgtattgtcacaacccctgagccacataaagatgattctgacatcaggagatcagtggatttgcttttctttaaactttatcaatttcttaaatttctgccacactttatcttgcttcatattggacaatgatccttggaagttattactacttttttgggagagcattattatttttactatctttgctgccttgtttcctggaccttataactttcttctggatatactccttcattatgtgggagtgcatcctcaggaaactttcttaaattagtgcaggagagaaaaactttgagttctcacatatttgaaaatggcattgtttcacttttatatacaattgaaagtttatcttaatacagcattatagattgcaaattattttttatcactactctaaagacattgttcctttatcttctatttttatgtattgctgatgaaaaattcagtgcttatctaattttccttactttgtaagtgattttttttcttctttatggaagctttcagaattttatctttaccagtgtcctgaaatgtcatgagattgtgtttgggatgctttttttaaaggtagtaccttaggctggcaaataggcaagccctggatacatcatttctgtttcaaccaaagtagcttttataaactggtcttctgtataagatttaactggaactaaggtttctgtggcttagacagggtgtgtgtgtgtgtgtgtgtgtgtgtgtgtgtgtgtgtgtgtctcatctccaattattttccttggcctttgagtgctgactagcttttggtcttccgcagttgacaacacttactacaaagaggcagaaaaagaaaatcttgtggaacaatccattccgtcaaatgcttgttcttccctggaagttgaggcagccatatcaagaaaaactccagcccagcctcagaggtaagactttggaatctcaaagtggtggttatgataataatgttcaaaggatagttactggacagaacatctattatgtgtctatactgtgtttatggacacctttatgttactttttttttttttttttttttgagacggagtgtttcgctcttttgcccaggctggagtgaagtggcatgatcttggctcactgcaacctctgccccaccgtgttcaagcaattctcctgcctcagcctcctgagtagctgggattataggcacctgccaccacacccggctaatttttgtatttttagtagagatagggttttgccatgttggccaggctggtctcaaactcctgacctcaggtgacccacccgcctcagcctcccaaactgctaggattacaggcgtgagctactgcgcccagctatgttacctttaaaaatcctcataatatgggtttgtgtggttggtataaattaaaaaaaatctgtataacatttatgagttgtaggtaatatgcttaattaatttatagataaggtctcagagatactaagttgcttgcttaaggcaagtttatttcagagccaagattcaaactcttatcaatctgtttccaaaggccttgtatggatataattgttacatcttcctgatgtcaaatatctttgttcttctgtattactttagctctctttttcttttttttctttgagacagggtcttgttctgtcacccaggctggagctggagtgcagtggcacatagttcactgcagactcgaactcctgggttcaagtgatcctcctgcctcagcctcccaaagtgctgagactatataggcataaaccaccgcatccagccaatagacaaatttttattttatttatttttgagacagagtcttgctcagttacccaggctggagtgcagtggcatgatcatggctcactgtagccacaacctcctgggctcaagcagtcttcccacctcaacctcctgcgtagctgggactacaggcacaagccactgtgctcagctaatatttttgtatttcttgtacagacaaggttttacgatgttgcctaggctggtcacaaactcgagctcaagcaatccacccacctatgcctcccaaagtgttaggattacaggcatgagccactgcacccaggccagagtagagtttataatcagagtttagtgtttaccctctctgtggttttcttgcttctgaaattttgcctcaaaaatttcatcttttttttttttttgagagagggtcttgctctgttgcccaggctggagtgcaatggcatgatcttggctcactgcagcctcgacctctcaggtgtaagcaatccttctgccttagcctcctgagtagtggagactacaggtgcagggcaccaggtggccagctaattttcgtattttttgtagagatagtgtctttccatgttgtccaggctggtcttgatctcctgagctcaagcgatctgcccacctatgcctcctagagtgctgagattacaggcgtgagccaccatgcccgacacatgccatccttttttttttttcagacgagtctcgctctgtcgcccaggctggagtgcagtgggcgatcttggctcactgcaacctccgcctcccgggttcaagtgattctcctgcctcagcctcctgagtagctgggactacaggcgcccgccactacgcgcggctaattttttttttttttttgtatttttagtagagacggggtttcaccgtgttagccaggatggtctcaatctcctgaccttgtaatccgcccaccgtggcctcctaaagtgctgggattacaggcgtgagccactgtgcccggccggaaagatttcttaaacaggacacacacagaaaagcactgaccataatgggggtggaagaggttgataaattcaggcacatttatctaattaaaagataaagagatgaaaagccaacccctagagtaggagaaactatttgtaacccatgaatcctacaaagggcttatatccagagtatacaaagaattacaaatcaattagtaaagaattgacaagccagtagaaaacaggcaaacgacttaaactagcacttacgaaaagggacaaccaaatggccgatacacatgtgaaaatgtactcagtttcactgatcatcagagaaaagcacattaatttcctatgacccagcaatcttattttttttagaatagttaaaatgaggagataacccatcaatagtagactgaataaatagttgcacatccctacaatgaatattatacagcaatgaaagtcagtgaattagagctgtgtgaattgtcgtggttgaatctcacatacataaagttgagtgagataagccagacagaaaagaatacttgtagtagtgtggttacattatacaaaatttttgggtgcagcacaccagcatggcacatgtatacatatgtaactaacctgcccattgtgcacatgtaccctaaaacttaaagtataataataaaaaaaaaaaaccacaaaattttttgtttttcttcgaaactaacataccatgtttacgtaatacgtgcttatttggtaaaacaataaggaaattatctaatgatcacgctttttttttttttttttcaaggcggagtctcgctctgttgcctaggctggagtgcagtggtgcgatctcggttcactgcaagctccgcctcccgggttcacgccattctcctgcctcagcctctcaagtagctgggactacaggcgcccgccgccacgcctggctaattttttttttctgtatttttagtagagacggggtttcaccatgttatccaggatggtctcgatctcctgacctggtgatccgcctgcctcggcctcccaaagtgctgggattacaggcgtgagccaccgcgcccagcctatctaatgatcactcttaaaatcaaggtagcagtggttgtcagtgttctgtattttggcctaggtggtgatttcataaggtcttccactttgtagtcatttaagtatttttgttttgtgcactttttggtatgtattagatctgtcattatgctctttgttttgtattcatcttattgatttatttatttttagacagagtcttactctgttgcccaggctggcatgcagtggcacgctcatggcttactgcagccttgacctcctgggctcatgtgattcttccgccccagcttcctaagtatctagcaccacagatgcgcaccagcacgtagggctaatttttaaaaaattttttgtagagacagggtcttgatatgttgcccatgctggtctgaactcctggcctcaagcagtcctcctgccgcagctttccaaagtgctaggatggcaagcatgagctaccaggcccagccaagtttttctttttaatcattttattgaggtcacatttatagacaccggtgtatttaagaactaaaatgttatggttgaatttcaaaaactatcaacaagagagattagatttttagagcagagataatagcactccattttattgccctttgtagtttgacatcctttcacatttctcaggaacatttggatatctgtagtatatatatttattatatattttgtcaatttctctaccatagaagatctcttaggctttctgctcagaaggatttggaacagaaagaaaagcatcatgtaaaaatgaaagccaagagatgtgccactcctgtaatcatcgatgaaattctaccctctaagaaaatgaaagtgtgagtagccacaacttcttactgccaagggcagacatattgtaccttgtataccacttgtaagtttcttttctgaatttacactttagattgaatagattaaaattaaaaatggtacatctgtaatatgtttggtgtacctcaagcttgagaaatgcctaaaactgtgaccatggtgaggtgaattgttacgtgtgtcctggagggcactcacatcttagttggcataggttttacctctttttgtttttacggctaataacaagctgcatacatgatgtttgtttatatttttattagttaagaatgtattttgctgcaagtaatagtcttcaactggagtggtttaaagaataatgaattatttgtttcacagaggtctaaaagtagtttgctgctggctttggttcagtggctgatttttagctttttttttttttttttcgtacttgttcttcaagatgctgctctgtgtttcttagattttttcttttgcttgttgtctcactggcacaagatggctggtgtatctctaggtgttatatttatgtttaagagaagaagaagagtacagtaaaggaaaaagggcagcatctatatcaggaaacttaagtctttcgcagcaacccttaaatttcatttcattcgcctagacttgtgtcacttggattccctagttgcagtagaggctgttgaggcaagtacaatacttacttgtagcttagtgcgttgctgctcctcccgaaattggggttttgttaatgagaaagagacagaatagatattgggatggcaattaactctgccatttgatcatttgatggtgagcagttagagtccctccttactcttccaaaccaccactagataactcttatcttgatagcggttggctttctcaaagtttactcattgaagccattaatatatatgatctaatgatactgttggaagaatcatgtggtcgaagcatgcttgttatcctatagaatgagaaaatttaatccatatgcagtagatttggggaggagggtacaggctatgcttcagggaattgaaaacatattttttgtccttttgaactcaagttctaacaacaaaaagaagccagaggaagaaggcagtgctcatcaagatactgctgaaaagaatgcatcttccccagagaaagccaagggtagacatactgtgccttgtatgccacctgcaaagtaagtttctttcctgaatttaaactttagaatgaatggtataaaattacagatttacatctacaacctgtttggtgtacctggaggttggcaaactcctgaagctttgaccatggtgaggtgaattgttacatgtgtcctgatgggtgctcagatttttaaatttttatttaattaattaattttaaagacagggcctcattctgttgcctaggttggtgtgcagtgatgcaatcatggctcactgcatccttgacctcctgggcttacgtgatcctcccacctcagcctcccaagtagctgggactataggcatgcactatcatgcctggctaactttttttttttttttttttgagacagaggctcactctgtttcccaggctggagtgcagtggcatgatcttggcttactgcaacctctgcctcccgagttcaaacaattctcctgcctcagcctcccgagtagcccggattacaggtgtgcaccaccacacccggctaatttttgtatttttagtagagatggggtttcaccatgttggccaggctggtctcgaattcctgactttaagttatctgcccaccttggcctcccacagtgctgggattacaggtgtgagccactgtgcccagcctacctggctaacttttacatgtttttgtagagatgggatttcactatgttgcccaggctctcaaactcctggcctcaagcagtcctcttgccttggtctcccaaagtgctgggattacagatttgagccacagtgctggctggtgctcagatcttgaacagtcagaaaaatatactgttgaagcaaatttaaaagaaatataaaaggaaaaagttagcaacagttcttaccacgtagattgaacattttttatttttccaacctccctgctggattttacccaagccagcatacatattttcacaatcagttaatacaaaaccttgggttctgctttattgacttgccatgagattatttcagattttgtttctgtgctgctacaaaattttcacatttatccttttttgatagattgttaatattctatcaaaatatatttaactattttctgttgaaaatgtagtttccagcttttcatgattataagtactcagtcaacaactttataggcagaaccatttctttgagtgatcttctcagaataaggaaggagaaattccccacagggtatgaccagttttgtcagtgttgatatttattgccaattttacttctgaaatggaagtaccaatttatagtgccatcggctttttttttttttttttttttttgagatggagtctcaccctgtcacccaggttggagtacagtggcgcaatcttggctcactgcaacctccgcctcctgggttcaagtgattctcctacctcagcctcctgagtagctgggattataggcatgcatcaccacacccggctaattttttttttttttttttttttttgtgagacggagtctcgctctgttgcccaggctggaatgcagtggcacgatttcggctcactgcaacctctgcctcccacgttcaagcaattcttctgcctcagtctcccatgtggctgggattacaggcacctgccaccacacctggctcattttttatttttagtagagatggagtttcaccatgttggccaggctggtcttgaattcctgacctcaagggatctgtctgcctcagcctcccaaagtgctgggattacaggtgtgagccaccatgcctggccccggctaatttttgtatttttagtagagatggggtttcatgatgttagccaggctggtctcgaactcctgacctcaagtgatctgcccgcctcagcctctcaaagtgctgggtataggtgtgagccaccatgcctggcctgaagtgccattggctttgaatgaatatttttattttcttattatctcatctgcattgtttattaacttataaaattgtttctttttttaaattcatatagatggcatgaaattattattttaaaaatttaattgtaaattgataatttatagttgtatatatttatacagtacaaagtgatgttatgattcatgactacaatttggaataattaaatctagctaattaacatatctgtcacctcaaatacttaccactttttgtagtgagaacatttggatttttttttttttttatcgagatggagtttctctcttgttgttcaggctggagtgcagtggtgagatctcagcttactgcaacctccgcttcccgtgttcaagtgattctcctccctcagcctcccgagtagctgggattactggcacttgccactatacccagctaatttttgtatgtttagtagagatggggttttaccacgttggccaggctggtctcaaactcctgacaggtgatccacctgcctcagcctcccaaagtgctgggattacaggcatgagccaccgcgcctggctggaatttattctcttagtgtattacgattactaatgatatcctccaccctgtgcagtagagcaaaagaaaaatctttttcctcttgtctgagatttgttgtactctttaatcgtcatctccccatttcccccaacccccagcatcaaattattttaatttttatgtatttgctgacaagattgtattactgctactattgtaaacatttttccatatttcctcttgggtgaattatctgtttcctttttattttttttcttattggtaaccttatttgcctataagtgtccttggtgatattttccttactaagaatggatactctgtgttgaacattaccatgtgtcaagcacttcagagacatcatctgattgaacagtcataaataggatgtgaacatgagtatttacactcccatttcacagtggggaaaactgaggctcagggaagttaaatagttttctcaagatcattataggcagcaaatgaaatgacagggttgggatttagtcggctttacttctgagtttcttccttctgttacatgtgttttatgtgtattaaccctaggttgtagatactttcctcattctactggtctttttttgtttttgtttttgagacagggccttgctgtgttgcctaggctggtcttgaactcttgggctcaagcaatatttttgcctcagccttccaagtagctgggattacaagggcatgccattgcactaggcttctactggtcttttagtttttcttgtggcttacaacctaatcttttttgttgttgttgctgttgttgtttttggagatggagtctcactctgttgcccaggctggagtacagtggcgtgatcttagctcactgcaacctccacctcccgggttctagcgattctcctgcctcagcctcccgagtagctaggattacaggtgcctgccactacatctggctaatttttgtatttttagtaagatggggtttcaccatgttggccaggttggtctcgaactcctgacctcaggtcatccacccgcctcggcctcccaaagtgctgggttacaggcatgagccactgcacccagtccaatctcatcgtttatgatcatatttatggatattttgtaatatattttaatctattttagttattttcttctgaaattttttcagtattttggtataaagtgtgcattttcttgtctttatttatttattttttttgagatggagtctcgctctgtggccaggctggagtgcagtggcgtgatcttggctccctgcaacctccccctcccaggttcaagcaattctcttgcctcagcctccccagtagctagaattacaggtgtgtgccatcacacctgcctaatttttgtatttgtagtagagacaggattttaccatgttggccaggatggtcttgaactcctgacctcaggtgatctgcccaccttggcctcccaaagtgctgggattatagacatgagccaccatgcctggccaaagtgtgcatttttatttattttcatggtgttatctaattaagttagcatctatttattagatgatattttttggttttgatgattatcttatcacaggttaaaaatattatataatgcctgtagattcttttgagtcactgggtgcctttctcctctcctctcttctcatttactgattttctctttaggcagaagtttctaaaaagtactgaggagcaagagctggagaagagtatgaaaatgcagcaagaggtggtggagatgcggaaaaagaatgaagaattcaagaaacttgctctggctggaataggtgagcttggctgtggttgagtctgattcatgaggggtggttcttaacactcttggtaggtgtttttttttttttttttttttttttttttttttttttttttgagacggagtctcgctctgtcgcccaggccggactgcggactgcagtggcgcaatctcggctcactgcaagctccgcttcccaggttcacgccattctcctgcctcagcctcccgagtagctgggactacaggcgcccgccaccgcgcccggctaattttttgtatttttagtagagacggggtttcaccttgttagccaggatggtctccatctcctgacctcatgatccacccgcctcggcctcccaaagtgctgggattacaggcgtgagccaccgcacccggccagtaggtgtttttgaagtctctgaagtaaataaaaaggctttctcatttagtagtcagcataaaaaagatgtgtttattccttagcactttctacatatattggtattttacatatattggtacttaaatatatcggtactttctttctttttttttttttctgagacagagttttgctcttgttgcccaggctggagtgcagtggcgtgatctccgctcaacacaacctctgcctcccgggttcaagcaattctcctgtttcagcctcctgagtagctgggattacaggggtccaccaccacgtctggctagttctttgtagttttagtagagatgggatttcatcatgttggccaggctggtctcgagctcctggcgtcaggtgatccgcccacctcagcctcccagagtgctgggattacaggcatgagccaccgtgcctggctcactggtactttcttaaaagtctgttcttggtcttagggaaaaaaaggaacttggattgagacagaagataaagtaattgggcagaccagtttgttgttttcctatttttttctaaaggcaaaggaaaagaaaacagtcaaatccaattcacctgtggaggaaaaatatgactgagagagctgaaggggtcacagttctgctttgctcgggcatagagttgttattggtggagtcataactataaagttctccttactggattgaaaaagcacccctggagtttataggattttcctcttagagatgctgagttaactgtgctttcaaagtcaatccatagcttttcttatcaaaagtattccagttattctttttctccatagctatgaccacacctaggagatgggattcttctaccctgtgctactacttttttttagtttgcatctgactgaaaggcctcaaacctaatagtactcagtgaatatgacacatatattagtgtccctgaggactacttcaagttttgggttacaggtagatagtaagcaaagttagatccatggtgacagaaatagcaaaaggactggagtaaaggggatttactggtgttccctatcttaatgttgtctgtatgttttactgtgttcatctctcagggcaacctgtgaagaaatcagtgagccaggtcaccaaatcagttgacttccacttccgcacagatgagcgaatcaaacaacatcctaagaaccaggaggaatataaggaagtgaactttacatctgaactacgaaagcatccttcatctcctgtaagttgatggactaaatgaacatttctgttactaatattcatttaggattttacgtgtagcatttgtggtcactgtttataatagtataattgagaaaaaaaaccttgtgtctataaagttgtgtaaaatataacagatctttttttttttttgagatggagtttcacttttgtcgcccaggctggagtgcaatggcacgatttcggctcactgtaacctccgcctcccgggttcaagtaattctcctgcctcagcctcccaagtagctgagattacaggcgcctgccaccactcccagctaatttttgtattttgtagagacagggtatccccatgttagccaggctggtctcaaactcctgacctcaggcgatccacctgcctcagcctcccaaagtgctgggattacaagtgtgagccatcatgcctggccaatataacagatcttataggaaaaatagggttggggcagaccagtcaaatctcatgcagttttgttaccagagcaccaacaaaatcagtaataatcgttaagtaaaaatgctagtactaataatctccacttgcatttgtagtcagtatcatcattttttgaaattagttatttgcattcttaaaccctgaggttatgcttctttctttgagatacaggtccttgaagggttttgcttccaattagagaccagttttatcaaaattactggtccaaggaataggaataggcttcttcatcagtctctttaggggatgtatggagagattccactgattcaggaagctgcctgacctgatgcatacccagaggcccaatcaatttttttttttaaagtggagttgagggtgagatttctttgcagtgctttttgtcttcaattctaagatagcttactctggattccttcaaaacattgacatggttggggggaaattacctatgtactattccagaacataagatttgttaagtgctagatcctttcttccatttttaattttttttaatgagaacagattagttataacccttgctcaaggactgacaaacttcagaataataatcttggttttacacaggccttttttattgatcctctgtgccgaatatgtggcttatggtagatgtgagctcttccgtgacatttcatttggggaacaacttttctctttacaggcccgagtgactaagggatgtaccattgttaagcctttcaacctgtcccaaggaaagaaaagaacatttgatgaaacagtttctacatatgtgccccttgcacagcaagttgaagacttccataaacgaacccctaacagatatcatttgaggagcaagaaggatgatattagtaagtttcctaccagtatcacagttggatggaacctctcctacattccctctgcttacatcttaggcacagatttgtctttagctgaaatcctagtttttcaattaaagtatggcgtgtgactatgcagacaacaaatgtatccttcagaatttttcaaaccacccagctgtctgtcttatacccatcaaccgtcttgatcctcctcatcaataattggccaaggggaatgagttaaggtaacctgagatgtcattacacatccttaacggacatttttttgccatgtgtcaaagtgtcacattgcatttagttacctatagaaaatgaaggcatttcattcattcaaggctatgtgctttttattcagtggtccaccaaaatttttactactactaaccaggcacactgtgttaggtatatagaggtaaataaaatagacttggtgctactcaacatcaggtttctaattcaagtttcaaaactcgacatcaagtttcaaaagcctttaccataatttgtagtgacctatttatctctgtcattagagatacactaattagttctttgcattcttaaactgtcattagataaacaggtcactacaaattatggcaggggattttgaggaggagggaggtgcaagagtcaaaggaggtgggagatagggagagcatgtctgaatgttgagaagtctcgtcagagataaagaagctgaaggtacgagagagaggagataactaatggattaagtccctgagcaggcaggtattggagggatacttagcacaggtggagtgagtgttctttaaaaggaggatggaagagtgggaggaatgggtgcaaatactgggggagtttgtagatttggtggtgagcagatgagcggattctaatgtaatagtttctatctttatggaaataatttctgcaagaaggaagatgaaatctgaagggtggaggtggtattaaatagttgttgggagtatagggatagtattctggataaagcagaatgtggttgttttacctttgaggatctctaaattttttatatccttgcataggcattttttttgagacagagtctcgttctgggtgtcatcacccaggctggagtgcagtggcgcgatctcgactcactgcaacgtccacctcttgggtgcaagagattctcgtgcctcagcttcccgagtagctgggattacaggtgtgtgccaccatgcccagctactttttggattttaagtagagaccaagttttgctctgttggccaggctggtcttgaactcctggcctcaagtgatccgcccgcctcaacctcccaaagtgctgtgattacaggtgtgagccactgcgcctggccaagtacagcattttttaatattattattatgttctagtggccaaaatgattttgttagattttatagtatgaaaataatgaaatattcttctttattctaatggaaatttaaatattaagcataacttttcaaataatatatgactcagagtctgatatgtcctgctttcagaatactagtcctggcaaaaggaaagagaaattatattatgcaatttttatttaaaactttgtacagttacagctaaataatggttacatgtatctttgaaacatggcttatttctaaaatagatttggttttgatctaccactgttatgtgacaagacctaaattgaaagattcattctatattagttatgaaaattgacaaggtttcactggccaggtaaattaatattttcaatgagtggtggtgatgtcttaatattgatgctttaacatagtttttaactttctccatttgattttctgtaagatgtggtcttgatgcttttatattgatttcataaaattgggagttttcacttggtcttcttttgttatttatttatttatttattttccttcttgttttgctttttagagacagggtcttgctccgtcacccaggctggagtgcagtggcgtgatcatggctcacttcagtgtccaactcctgggctcaagcaatcctcctgccttagccttccaagtaattgggactatatataggtgcatgccaccatgcttacctaatttttatattttcttaggagacagggtctcattatgttgcccaggctggtcttgagctcctggcctcaagcagttctcctgctttggccttctaaattgctagaattacaggtttgagccattctgttcaggctttacttggtctttaggaaggccttatatctttttttttttttttttttttgagacagagtctcgctctgtcgcctaggccagagtgcagtggcgctcatttggctcacttggctcactgcatgctccgccttccaggttcatgccattctcctgcctcagcctcccgagtagctgagactacaggcgcctgccaccacgcccggttaattttttgtatttttaatagagacgggatttcaccgtgttagccaggatggtctcgatctcctgacctcgtgatccccctgcctcggcctcccaaagtgctgggattacaggcgtgagccactgtgaccggccaggaaggccttatatcttaaagctggaataagcaaaaattttttgtgttaataacaagcaaaataattggcattgtcaatagaaagtataggcctggccaggcacagtggcttaacgcctataatcccagcactttgggaggctgaggtgggtggattgcttgagcccagtagttcaagaccagcctgggcaacatagtgaaaccctgtctctacaaagaatataaaaattagctgggcatggtggtgcatgcctgtaatcccagctgcttgggaggctgaggtgggaagatcacctgagtccagggaggttggatttgtagtgagcctttatgcccctgcactctagcctgggcaacagagtgagaccctgtctcaaaaaaaagaaagtcagtctaggcccgtgcagtgataaggaacctgtcagacatggatggattttcagttcagaagatgacagtagagtttacccaaaggctaccttagtcatacccctcaataaaagaggaataggggagaagtaactgaatgttggttggtttgaccaatgtaagctgagctgactgttgtgggcccaccactctgtggttggtttatccctctctgggctacataggtgaatcaccacttacaagtaaactgggtcttgcggatctagatgaacatctgtcatctctgtttacagacctgttaccctccaaatcttctgtgaccaagatttgcagagacccacagactcctgtactgcaaaccaaacaccgtgcacgggctgtgacctgcaaaagtacagcagagctggaggctgaggagctcgagaaattgcaacagtaagtcccactggcagtatctgaggaagagttccacgaacctgcctactttattttcagttctgttagggtgacagttgctatttttctttccgtaaaaatttatggcatttgagtagtaggctctgcaggctacgcccctgcctatatgatttaaggactatagtgggaatatggagatgttctggagtataaactggtaaaaattgaatccaggctgggtgtggtggttcacacctgtaatcccagtaccttgggaggccgaggcaagaggatcacttgagtccaggagtttgagaccagcctgggcaacatggtgaaaccccatctctacaacaaataccaaaaaaaaattagctgggcatggtggcatgcgtctgtagtcccacctactagggggcagcctgaacccaggaggtcaatgcttcagtgagccaagatcacgccaatatactccagcttgggtgacaaagcgagactgtcttgcacatacacacatacacacacacacacacacacacacacacacacacacacacacaaaatctaatccagaggttgcagtagaagaacttacttaggatttcaattaaggaatgccctctaaggttaagttaggtagatcccacccttttgtgactccccaagggattgttacagctattattagtggagggaaatggaaacttagtgtgattcgtagcattggagtttatttcctgtatccttcttccattcctttttgtgcttcttttgaggagggggagcttcttctgtgaagtgaagcctcaattcttaagtggtagggatgttaggactgtctgatttattctttcttcttttattcttttattattttttatttatttattttttttgagatggagtttcgctcttgttgctcaggctggagtgcagtggtgcctctaagctcactgcaacctccgcctcctgggttcaagagattctcctgcctcagcctccctagtagctgggattacaggtgtgcaccaccacgcccagctaatttttgtatttttagtagagatggggtttcactgtgttggccaggctggtcttgaactcctgacctcaaattatctgctcaccttggcttcccaaagtgctgggattacgggcatgagccaccgtgcctggcccattgtttttcgtttttatttattttattctgttgtccagtcaatgggagcataatcttaatgattactattctttgtggttggcttactttgtttgtgaagttttcattttattaaaattttttttgtggttatttaaattttcaccttacagatacaaattcaaagcacgtgaacttgatcccagaatacttgaaggtgggcccatcttgcccaagaaaccacctgtgaaaccacccaccgagcctattggctttgatttggaaattgagaaaagaatccaggagcgagaatcaaagaagaaaacagaggatgaacactttgaatttcattccagaccttgccctactaagattttggaagatgttgtggtaaggttgaggctatgtgtgctggcagaagtgtactgctcatgaccagatatccacccattcacacaaaagtttgggtagatattatgagcagggcatcatattaggaactgcaggtgataaagagacttatcggaagtggattttgcttttagttaactcaaagtctggtatgggagacaatatatgtgtgaataatagaaaatggacagaagtgttctgagagagatgacagttaaaataggaattcagaggagaaaatggtttcttccagatagaaagttcagggtgtgctttgtagagaggcacatttgacctgagccttgacgatgtactgtagtaatagttattgtgttgctattgttgtcataatagctgacaattttactgtgtgccaggactgctctaagcccttttcatatattagcccattagttttgacaacaacccctttaggtgggttattttatcacctgtttcagatgaggtaaccgaggcacacagaggttatgtagtattcctagagcactcagctagtacatggtggagcaagtaagagttcagacactctagctacagagtctgtgatcctaatacctcattatatgcctctccattacatgatagaattttgacttgcagaaatgcaaatggactggattggcagaacattccaggcagtaggaattacatgataaaaagcctgacggtgggaaacaagaagcttctactgggagctgttagtgggtcagttaagctggagaaaagtttatcaagagccactggaaactgtttcagagaagtgagttgtagtttgataataggctcacaaccacaagtttagagaaaatgtgcaatcaggaagcaaggctacagtcagagaataagcaatggagttaagcacctgcataaatgcgaaagcggcttttagttacatttcagtgcagatgaggacctcacccgccgccactggtttggattgcctggattgatgcaggtccgggataactctagaagcactctgttttcctatcttctttctttttgcttgctttagagtcaccatgcttttaggggaaactgcaccaatgtattacctttgactgagtacctagttttgtttattgtattttcttagcactaaatcagaagcaacttgaagttatattttccaggctttacaaaaatcatgattatgcttagaaatggttctcctccctgatacctacttttgattgagagctttttgcgtgacttctgttcacgatgcttttttttccctgccatgatgcatatgtactatatgccaagctctgttacaataaactgttaagaaatcttcccccacccaagtgattaatctccaagggctgtgccttctttgtctttacccattgaggaaacagtgttgtgaatacaacaagggaaaagtaggttatatgcaaacctcagagttgtagagccagaagggctcaacgtttagttttacatacaagataatggagccccagataagagaaattatttcttcagggtttctataacactcttttggcaccttgcttttggttttttgttttgttttttttttttgagttggagtttagctcttgttgcccaggctggagtgcaatggcgtgatctcggctcatggcaacctccgcctcccgggtttaagcgattctcccaccttagcctcccgagtagttgggattacaggcgcatgccaccacgcctggctaattttcgtatttatagtagagacggggtttcgccttgttagcccggctggtctcgaactcctgacctcaggtgatccacccgccttggcctcccagagtgctgggattacaggcgtgagccaccgtgcctggctggcaccttgcttttaataacatattttcctccaagcttttccccctacctaagtttttgtttttatttatgtaccactctctcaatttgtcctatatccttgtaccttacataccaatattattattttaaaaatcaactcactttgtaacctaacgtaaatttaaagggaacttttaaataaatatgtaaatggaaaaccagtaccttttgccacaaataacacagcaataatagctaatacttatataatgcttattacatgccaggtctttattctaagctttttacatttatataataatgcacttaattctcacaacaaccctatgaggtaagcactgtaggtacttaatccattttacagttaggaaacatagaggttaaataacttgcccaaaatcacaaactagtgagcggcagagctagcatacgaatcttaggtgatatgattccagggtccatgctgttatataaaaatagaggttaccttttaaaatagaaggttcttaggaagtatgtgcttatttaaaaaaaaaaaaaacaacagtctacacctcacctaagatcctttctcatagcatcagtcacacctgaactactgtttttttttttttttgagacaatctcactctgttgcccaggctagagtgcagaaatgtagtggtgtaatctcagctcactgcaacctctgcttcccaggttcaaccaattctcatgcctcagcctcctgagtagctgggaatacaggcacacaccaccatgcccagctaagttttgtatttttagtaatgactgggtttcgccatgttgcccaggctggtcttgagctcgtggtctcaagcaatccacctgccttggcctcccaaagtgctaggatagtaggcgtgagccactgcacccagctgaactacatttttgaaaacactgattaggaaattggtttgtcagttgtgtgtactctagaaatgctagggtgaagtagtaagtagggaagggtgaccagagttcattaggagttagttgagatcttagagtagttgggtaccaggttatacctgtgaaaattctgtgtaaacagatctgcaaagcactaggtaaggtgtgaccgaattgatacgatttgcggaatggaagtgtttgccaaatccagctggttctcagaatcctctggggctcttattacataaacagatttgttgggtacatcacagagggagcccagataaagcactgagtatggtgcctgacacgcagtaagcaggggtattattaatagtaattgtcattttattgagtgcttacattgtcctgagtactttatgtagattgtcttatttatgtctgattacacttctaagaggtggagtctatacttatccctatttttcagacaagggaataaacactgagaggtatctagtatgcagaaccagaatctgagcccatcatctccttaaacactgtattattgtaccctacaatgcttactgttatcatatttattttggcaaatgaggtttctgagtttgacactggctgtttgcaggtttccctactaaaatttccagtgatttgacttcaactcttggtttctagagaagcatagcataggaagagatgttagatgtgttttcttctacccgcttcacttttcagaaagggaggttttgaaaggggtgcaaaccaaaaagtatgagacaggtctcaatcaatttagaagtttattttgctaaggttaaggatgcatgcctgggagacaggtctgtacctttctccaaagatgattttgagggcttcatattttaaggggaaagggtggatagtggggaaaggggaagagattttgaaaaggtatgggtaggtaagaggcaaatggttgcattctttgttcacatgtgagagggggtagaggaatagttacttatgcattcatctagttcagtgaatctgcatttttacataagataattagggcagaggaagcaatcagatacgcatttctcaggtgagccaagggatgactttgagttctgtcctttgtcctgtacctgtgaagataagctatcaatttatattgtcagggtgaaattcaacagaactgttttagggtgaagaacttggggcccccaaggaattttcaagtgggcaaattgtgagggaggtatgtacctttttcatctttgaatgggaggcaggtttgcatgttgaagttcctagcttgacttttctccttggcttactgattttgggggtcccaagatttattttcctttcacaggggattatagcttgcctatggaaacatttaaaagaaacatttataagagagtaagtcggccaggcgcggtggctcacgcctgtaatcccaacactttgggaagccaaggtgggctgatcacctgaggtcaggagttggagaccagcctgcccaacatggtgaaaccctgtctctactaaatacaaaaaaaattagccgggcgtggtggcaggcacctgtactcctagctactcaggaggctgaggcaggagaattgcatgaacccaggaggtggaggttgcagtgagctgagattgcaccactgcactccatcctgggcaacagagcgagactctgtctcaaaaaaaaaaaaaaaaaaaaaagtctttgaacttctagtgttggacttttacagcagaatttaagagcccaccttccagagcctgatgcagcttgtctgtctgatgcttttgttccccatccacgtcccccccagtgctgaagctgtttcgtgtgtccttacagtgtttcctctgcacttccacttgtggttgataagtggcagggggacaataaatagagttgatgaaagatgggcttgggcagcagtgggcccaagtgaggcagaaatgagaaaaggactcctggggcagaggtggagtgacaaagccttgagcacgagggtgtgaaatgtgaacttggtgctgacctctattgggcagccggggcaccacggaggtggatgtggtgtcagtgagaccagtgagtaattttagcagagatactttagggatgacttggggagggcagcaggcttttttaaaatatatatacttcccaaaataacattgcttcagagtagtttcctaactgccctgggacaggcctgagatcctgtcccagggtacttggggggcacatcctgtcttagggagaggtattcacctccccattcccatccccagtcctggctgcttttcctaaatgcatcatttatccacccacattgccccattctaaccacatatcacctctttagagataccttccccttcattgagggagcatccctctaataaccattagctccatattctgctgggtttctttagagcacttgtgaaaatttggaagtatttaatttgttaaatcttcattgtctctttcctccattagaatgtgagctccctgagaacagggaccgtgtgtatctatattattcactctgtatccctagcccctagcatagtgaccaccacagcacaagcactctgatatcggataactgagtgagtaatagtagaagctgacatgcacctagacactaggaattcaaagatggtataagacacggcccttgtcctcaaagctttcatagtctggtagagcatatagatgtgtaaatgagtaaatatggtaatattaaccaacatatgttcattgaacagttactacggggtcttctagtaggtgatatgggaagacaaaagaatgcaaatgacaatattccagtcctcaaggagcttataatttaaaaaacttaaaatagcaaaaacaaaaaaaaacaaaaaaaaactttctttgtttctgtaaacccaattttcttttcattatttctaatcgagcccctagttaactttgatggaaggggggctggggtgtgagtggatagttgctgcaaagatgattttcataaatcatcttttcctctcccccaactaattaagagattgagctcactcatacatatctccttcatggcctacttattagaggtttcccttgcttctcttttaaaatgcagacatttctgttgggtgaatgcagagagagggaattatttcagaactaaatgaatcctcaattacttatttcaattactttattttattaaaaaaccccaaggcctagaaggatatctgatgtgtttaaggttatacagattggaagcagagctgggctggaacagacagacccgtggcttcttgctcactatttgtctctcttccacttgcccctggtgcattcaagcaagatgctagtgtccacatgtctatagaagagcagattttgttgttgttgctgttttatggtaaacatcatttgacaacccatttcttggagttttgtcactctgaatacaagatctgctatattggatttcactatgctaatgattctagcattctttagaaaacatataagaaatttcacagcagaatgagcattctcagtggtcaccttgagagactgtaaatcccttccaatgattgtgatactgcaaaaagcattttggaaaagccatgcatcttgaatcctgagatgagcctttgggatccctcccaggatgacaaatcttcacgtgtattttaaacattaatttgcttttaggatctagtctaaggttatttggaactaaaacttctgagtagtccaagataatagaggtgtaaactatttgttaaatgaatagtaaagattgagcaactgtcttgcatggtccagaaagtgcctttgaaagccactccaagaaagacattccaaacatgtttcgaacggttgcagcattgttgggattaaggagaaggctcccaaggtatcctcctagagtccaaggtataaattctgttactcatgtgttcattcattcttactgcattcattcaacaaacatttactgagtgctttatacttgccaaggtctatgttaggtacttgggtctgatggagtaaaatagtctccatcctcgaagcactcaggctagcagggggaaatgaacatctaaataaataagtgcaattaagttttgtatggactgtgataaaaccatatacaatgggataaaggggtcagttctgtaggtcctgggagtggagagatctattgaaaggctttataaaagaggaaaggctttataaaagtggaggcttgaaaagatgaattgggtgctttcaagcagccggggcatttcagacagagaaagcacaagcaaaggtaatgagataggaaccatttggggagcgatcagtagttcgttgtggttgcaacgtgatatgtaaggaggggtgagaggtaaggcgggagagtcaggagggtaccagattaatgctactactaaggaggccatgaaggcgatatttatgagtgagattcaagcaagtgccttgtgtttcacgaaaaggaatttgttatgctgttgtaggtaagcaataggagccattaaagaattaatttttttttctttgagacggagtcttgctctgtcgcccaggctggagtgcagtggtgcgatcttggctcactgcaagctccgcctcctgggttcacgccagtctcctgcctcagcctcccgagtagctgggactacaggcacccgccaccatgcccggctaatttttttgtatttttagtagagacggggtttcaccgtgttagccaggatagtctcgatctcctgacctcgtgatccacccacctctgcctcccaaagtgctgggattacagacatgagccactgcacctggcctaaagaattttaagtcaggaagtaatgtgatcaaatgtgttttagagtaataatgtggactacatgcagacaatgaattggaggaatgagttgtggagctgaaagactgttaggagactagcagaatggcacaggcaatagctgaagtaggtctggcaatgaaactttagggaagagcagaatagagagctgatgggggcaggatgtggacacgagtgtaacaagaaattactgaggttttgttttgttcttaatcgatctggccgtacacttcattcaaaacagcagccaagagataccattttgcagttaggattaattgccagatttgtgatagaatataaactctgtgtgaatcaaaaaatgctgtggaacaactctctaaaatgtgttagttttaaattatgtgcacaatatgatacatgtcatttattccacaacgatttgaaatgttagcagtgttttaaaatcattaaggaaaaatcttcagggtagttgaatgtgttggaattatgagatataaggctgggtacagtggttcacgtccgtaatcctcacactttgggaggccaaggcaggagattgcttgaggccaggaatttgagacccatctctacaaaaaatgattagctgggcaaagtggtgcgcgcttgtagtcccagctactcaggaggctgaggtgggaggatcacttgagcccaggaggcagaggttacagtgagccgagattgccccattgcactccagcctgggcaacagggtgagactctgtctcaaaacaaacaaacaaataaaaggattatgagatgtagaaaattaaatttctctcttaattcaccctcaaagagatatgagagttgacaatttggtgttctttcccttttatgttcttttattttctgtgcttagattaattatattttaaaaactcaaaaatatcattctaggccatgtgcagtggctcacacctgtaatcccagcactttgcgaggccaaggcaggaagattgcctgagcccaggagtttgagaccagctgggcaacatagtgagaccctgtctctacccaaaggggaaaaaaggatttaatcttctcatacagcttagtggagatcattttgtgatatctaattgagttgcttactcctttcagggtgttcctgaaaagaaggtacttccaatcaccgtccccaagtcaccagcctttgcattgaagaacagaattcgaatgcccaccaaagaagatgaggtgattccctgggagtaggggggttctttttccttctatatagtcagtcaatctaagccttatcatttattaatcttaatggagttcaaaggcaaccactcttttttggacttgtctttaagaatgggtatgaacatttgttcattttttttgttcctccaagaacaaagtaattggtaagggtatgaattttctgctcttagtgataactagttacaatttatggaaacagtaaggagcagttaagcattggaggcttgtctgctgtagcattgaaaatcagctgctctttgtaacatggatcaaaagttgcactttattttgccttagattgtcactattcagtgatggactttgaaaattcatactaagcaattacatccaccttgtcctatctccgttaacccagaggagttgcaaaggtgactgtggtgatcgtttatggaattgtaatatataaactgtcattggtcaggccagtttcttgttacatctcccattttatctataaatatccagagttagggtaattttatagcagattgcaagcataagcctttttataggttcatttgaaactaaaatacgcagtaatcttgtgttaccagcttgaacccaaacaacttgggtttggcaatcctattctgggtttggcaaccattaagtcccagtcacatgttttaatgaagtctagaggctgggtcaaagaagagactaaggtatatgcttggttgggaccgatcttctgatgttcattttattcataatgttagatcttatttagtttttacaacattcctgtggaaaactagatcttttaagagtaattgtgttagcccttggtggtagatgacttacctaagtcatcatccttcttggatagaaaaggaagctaagacttcctttaattttgttttaattaatgccacatattaatataatgtcttctgactccacattctggggaagttggagagagtgaggagtcttatttctaaactgcaattttttccctaggaagaggacgaaccggtagtgataaaagctcaacctgtgccacattatggggtgccttttaagccccaaatcccagaggcaagaactgtggaaatatgccctttctcgtttgattctcgagacaaagaacgtcagttacagaaggagaagaaaataaaagaactgcagaaaggggaggtaggtgtttccatttctgcaagtagtgtaatactattctttgatccctcaaagacagttttttctgtagcacttttaactataaaatcactgacttcttttgatctttctaagaaccctataaaatataaatgggacaagtaatttaaataatccttctggcacaaggaggttaagtgacttgcctctgatcacactgctggttataggcaatattaggaggaaagcctagatttccttttgaacccattattcattctttcatgctgctttgaaaggtttccttccttatttttcagattcttccagatattctggagcagctattgctttccagctagtctttatcttaaacctcatgttttcttttctgttaggtgcccaagttcaaggcacttcccttgcctcattttgacaccattaacctgccagagaagaaggtaaagaatgtgacccagattgaacctttctgcttggagactgacagaagaggtgctctgaaggcacagacttggaagcaccaggtaggggatggggagagcagccaaaatgttaattgcttggttggttgattgtacaggcagacccaccatactgaaatcacctgggttaacatgctacattgtttcaggggctctcactgtaaatcaggggtcagcacattatttctgtaaagggccagataagaaatattttaggttttgtaggttacatatggtctctgtcgcatagtgtgtgtgtgtgtgtgtgtgtgtgtgtgtgtgtgtatgtgtgtgtgtacgcacacattttgttgttgttgttgttgttttttgagacagagccttgctgtgttgcccaggctggagtgcagtggcacaatctcggctcactgcaagctccgcctcctgggttcacgccagtctcctgcctcagcctcctgagtagctgggactacagacgcccaccaccaagcctggctaatttttttatatttttagtagggatggggtttcaccgtgttagccaggatggtctcaatttcctgacctcgtgatctgtccgcctcggcttcccgaagtgctgggattacaggtgtgagccaccacacccagctacatgttttcaactctttttttgtttggtttgagacagagtgtcgctctgtcacccaggctggagtgcagtagtgcgatctcggctcactgcaacctccgtctcccaggttcaagtgattctcccacctcagcctcccgagtagctgggattacaggcgcgtgccaccacgcccagctaatttttgtgtttttagtagagacaaggttttgccatgttggccaggctggtctcaaactcctgatctcaagtgatctgcccaccgtggcctcccaaagtgctgggattacaagcatgagctgctgtgcccaatcaactctttaaaaatgtaaaaaccattcttagctcaagcgctgtcctaaaacaggttgcaagctggatttggcctgtaggccagagtttgctgacccctgctctaagtgatcacctgggaatgtcccctgctccaagtgatcacccggggaatgtgggaaccgacaggcttttctggagttgggagtttctttaagatcttatctattccatctattagactcattcattgtgtttattcctttctgttgatgcattggtaagaaacagtatgggagaatagattgaaatatacaatgctgttttctcagcatgatgtgctatttgctctttataaatgacaggtgatttaaaacaattaattggttatttgctgatttaattgggatctaattctacgtggctggaaaaaatttcccctgaatttctaagttttttggatttttatgtcatcattaatcttggattctttccaaaaggagctctaggctattgtttgtttgtaggaattacccctcctgaagcccgagagttgtaatggcttacatgactgaacgttggtcccctgttagtgtggttctctaagaaaccttaggactgttgccttggaaatagtgaattttcccctctcaatgaccaagacacagaatgtctgtgtagggcattttctgcaaagaacaacaacaaaaacaattgttttaaaaagcttttcagaaatataaaagtagggtgaatagtataatgaattttcatgaacccatcacctggttctatagtgatcaaaacatgaaaagtcttgtttcatcccaacttctacccacttatcttacactggatacttctacctgtgtaagattactttgaaacaaattctatgtaacatcccttttcatccaaaaatacttcagtgtatatatttaaaatataaagacttataaccacaataatattctcacacttaaaaagattaaaaataatcaaatatctgcacatttctcataattttttaaacagttgaattgttaaaatcaatatccatatatagtctacatagtgcctttgtttgctaaatctccgaatcttctttcaatctataggctcctctctttgcattttatttgttgaataaactggattgtttgtactgtagattttccacaatctggattttgctgattgcgttcccacacagttgtctaacatgttcctctgttgcttgtatttcctataaatgagtagtaagatctggaggcttgattcaattctggttagatttttttttttttttggaggtgggaagaatactttataggtgatactgtatagttcctaatgaatcatgtgtgaaggcagaaaatgtctagttgtttatttttatgatataaagataggtcttaaaagtacctttaaaattttttgttttttttaattgacaaataatagttgtacatattcttggggtacatagtgatgtttcaatatgtataatgtgtaatgatctgatcagggtaattagcatatccataatctcaaacatttatcatttctttgtgtttggaatctttttttttttaatttaaaagtaaactttagcacaccaacatggcacatgtatacatatgtaacaaacctgcacattgtgcacatgtaccctaaaacttaaagtataataataagaaaaataaatgtgaacataaactaaaaagaaaaaaaaaagtaaactttaatgtcgaaaatgcaaacttgggaatcttaaaagtatcttaaaaatgctttctagttctcagtgagttcaaatgttgtcagactgatctgttcattgtaaagtttgtgtgaaagatttttactagggtttatattaaatctgctatttttattgatgaagcagttcagacattagaacttaagttattgaggtagtggtcatagaaaggtgagacattgctcatctgactgactttctctctaatagctggaagaagaactgagacagcagaaagaagcagcttgtttcaaggctcgtccaaacaccgtcatctctcaggagccctttgttcccaagaaagagaagaaatcagttgctggtagtattatatgtactctgatgggactcgggcagaattgtcagacttcccagtgggatgctggaattcagtgtgtcagtacaatgctgtgtcaactagaagcatttgactttagcagatggtagcttttcttcccctagacccagttttttgcctttattgaacccagcagctatgttgagttgcaggatgtgttagggccagattcatttaacatgaaccttggcagaagcagctggcatttcaacaacaatgataggttttccccatccacagagaaacaagtaaatgagggagggagagccagtatggctttctggaattcaccctgaagcaaactttagatataaaacatttgattccttaaacactgggcagtgtgctagaatactgggattccaccgggtgtggtggctcatgcctgtagtcccagcactttgggaggcccggacaggaggatcacttgagcccagggatttgagaccagcatgggcaacatagcaagaccccatctctttttcaaaaaaatctttccaaaaagggaaaaaaagaatattgggatctttcttctatgtctgcctcaaaatcaatcactatatagttttgtgcaagctactttatgtctttgcctttttcccaattacaccagacgatttccaggggccctttgaactcttaaaattctaaaactttttgtatttagttggctctacctttctcccaatggggcttgtttagagcacagtcttcctgttagtgtgcatgtctgtgccacttgctcattccagggggcgtaggtttatgcaagtcctgcttgtgcaccaatattttttctgtttctgtacttagagggcctttctggttctctagttcaggaaccttttcagctggctactgagaagagagccaaagagcggcaggagctggagaagagaatggctgaggtagaagcccagaaagcccagcagttggaggaggccagactacaggaggaagagcagaaaaaagaggagctggccaggctacggagagaactggtaactgggagcatgagcactgacgaacacaaacatgcctctgttttattttacctgtaccttaccttgtaccagacaggatctaaggtagcccgcaaggctgtaccaaagacaatgagtgaaagggggaattgcacaaactgagggtggtgatgaagttgagttgtgaatgaagctaacgatgtgtacattgtgatctaagtaggagctgtaattttggccctttttaggaaccaacctgtcagttacaaaactcgcagtgttcatgagacataagacagttgttcaaaaaatacatttatccctttgatagtgaatttttagacagaatttcttccggaagttttcataaggaggacaacatgtggtataaccatgatgcctttcctaggactgttttttatttatttgtttattttatttatgtaacttattatttcctctggggttaagaagcaccactgagttttgtaattagacaagaatacatagcgaaggacatgggaattaaatggcaactgtatttttgttttaatactgagcccaaactccttggagttacagtgttcgtcgctccaggtaatcctctactaacataattatttagatgttggttatccaaaaagaaacctgaactccacattaaggaccaatctgctaggagggcagcaagttgtgttaactgtgttaatgaagaagcagacagttttagatggaacttcgtatgataaataaaaaaagaaagggtcatggggagatgttggtaaaaggttacttagttacagttagatgggaggagtaaatttcaagagatctatcatataacaaggtgactgtagttaatgatatattgtattcttgaaaactgtaaagaaagtggatgttatgtgctcacactacaataagtggatgttatgtgctcacactacaatgttaattagcatcttgctaattaacaaatgcattatctcacatagtaaccattccataatgtatgtctactttaaaacatcagcggtacacaataaaaatatacagtgttatctgtcaattaaaaagaaagaaggccaggaatggtggctcacacctgtaatcccagcactatgggaggcccaggtgggtggatcacttgaggtcaggagttggagaccagcctggccaaaatggcgaaactctgtctctactaaaaatacaaaaattagccgggcatggtggcacgcacctgtaatcccagctactcgggaggctgaggcaggagaattgcttgaacctgggaggcccaggttgcagtgagccgattgtgccactgcagtccagcctgggggtgacagagcgagactgtctcaaaaaaaaaaaaaaaaaaaaaaaagaagtgtaagttgttgaggttttgtctaaaagtgctatactacagctggatgtggcagctcacacctgtaatcctcacactttgggaggccaaggtgggaggattgcgtgagcccaggagttcaagaaaagcgtgggcaacatagcaaagtcccatctctattttaaataaataaataaaatgctagactagcagttgaaacagctattggcagctattggcataggtgattatgcccataggaaggttccacggacacactatttaggagaccagcctcttggtaaaatctagactaccatttgctgagtgaatgagaaaatagtataatccccactctatatacactcatacaatcagccttttttcccggcctcaactttgatttttctttagcatttggtacctgcctcttgtgtttgtccccattatagaactgcttcttgcagcaattctcaacataactgatggcaacattgtaaagcacaattcagtcaatgctggttaactctctactaatctggcttgatttaggattgattttagactaccctaaaggatggatgggaccatgccttctttagccacccttcctggtatggttgttgtgttttgtttttgctttttccccaggattcaggcttttggtgaatatttatagtcagtaaacttaagactgtactctgggaaattcttagcttgtaacttctctgctatacttgagtacagccctattataccctagtaaatcacacaggacataggtttggcattctttagtgaaagctgagggacttgaggagactgtggcctaaaggaaagctgggggacccaatagagacctgaatagaaacccttttgggctccaaagcacatacacttttccatcataccgtgttgccccccaggccccactccccacacctgaaactagtgactgggacctgtaaaactctacaaacattttctcaaaaagaaaaaaataaaagcaattataagcgtagttctctgacatccctctcactggtaacttttccttactttgcaggtgcataaggcaaatccaatacgcaagtaccagggtctggagataaagtcaagtgaccagcctctgactgtgcctgtatctcccaaattctccactcgattccactgctaaactcagctgtgagctgcggataccgcccggcaatgggacctgctcttaacctcaaacctaggaccgtcttgctttgtcattgggcatggagagaacccatttctccagacttttacctacccgtgcctgagaaagcatacttgacaactgtggactccagttttgttgagaattgttttcttacattactaaggctaataatgagatgtaactcatgaatgtctcgattagactccatgtagttacttcctttaaaccatcagccggccttttatatgggtcttcactctgactagaatttagtctctgtgtcagcacagtgtaatctctattgctattgccccttacgactctcaccctctccccactttttttaaaaattttaaccagaaaataaagatagttaaatcctaagatagagattaagtcatggtttaaatgaggaacaatcagtaaatcagattctgtcctcttctctgcataccgtgaatttatagttaaggatccctttgctgtgagggtagaaaacctcaccaactgcaccagtgaggaagaagactgcgtggattcatggggagcctcacagcagccacgcagcaggctctgggtggggctgccgttaaggcacgttctttccttactggtgctgataacaacagggaaccgtgcagtgtgcattttaagacctggcctggaataaatacgttttgtctttccctccctgattgtgttatttgatgtttttaaatctgttaagcccctttggaggtcacatcttattgggaaatgggtagtttgagaggtgggtccaggaactttttttttttgagatggagtctcgctctgtcgcccaggctggagtgcagtggtgcgatctcttctcactgtaagctctgcctcctgggttcacgccattctcctgcctcagcctcccgagtagctgggattacaggcgcccgccatcattcccggctaattattttttttgtattttaagtagagacagggtttcaccgtgttagccaggatggtctcgatctcctgaccttgtgatccacccgcctcggcctcccaaagtgctgggattacaggcgtgagccaccatgcccggcccaggacagtactttgtaatttttttctgtcttatgtcagaatatctccatattctgttaactctctctcagtaaccacttaatcatgtatgttatgccttcacacagactgtaccttcttccctaaagactcagctcaagttaaattttttttttgagatggagtctcgctctgtcacctaggctggagagcagtggcacaatctctgctcactgcagcctcccgcctcctgggttcaaacgattctgcctcagcctcccaagtagctgggattacaggtgtgtgccaccatgcctggctaatttttctatttttagtagagatggggtttcaccatgttagccaggctgatctccaactcctgacctcaagtgatccacccaccttggcctcccaaagtgctgggattacaggtgttagccaccgcgcccggcctaagttaaatcttttttagaaatctttccttgacctctgacctcctcagtaaagatggtcacttccttctttgtgactcccaaatgtttctctttttttgagacggagtttcactctgtcgcccaggctggagtgcagtggcgtgatcttggctcactgcaagctccgccactcaggttcacgccattctcctgcctcagcctcccgagtagctgggactacaggtgcccgtgaccacacccagctaattttttgtgtttttagtagagatggggtttcactgtgttagccaggatggtctcgatctcctgacttcgtgatccgtccgcctcggcctcctaaagtgctgggattacaggcatgagccaccgcgcctggctgtgactcgtaaatgtttcttgtatacatctcgagtagagcagttatactatatctgagttacttgaacttgttcacaaattaatagagatacagatatgtaagttccttgaagacaagaattgccatagccatctcttgtttattgtggctggcacagaattggcttaggtccatgttaaacaatatattttcttttagaattcacatcatttttgagtatcaactctatcattcattgcgtgtgctaggagatacaaaagcatctggattctgcccaggctagtcctaggtaccatatatgacctgaaacttattttatattcatttttttattcagtgagcatatatgaatctcttatgtacaagtcattgtagtcccagcattaattgacaaagcaagatggtgtttctcacagtatgatttgcagatcctggtcctcctgaacccccataaactgatgcgtgaagagtggagaatgaaggggtgtcctggaaccaattctccacggatactgagggatgactgtgtataccttagcactgttctagtctctgggaatacgtcaatgaacaaaaaaaaagaccttgccttcatggagctaacattttagtaggagagagagacagtaagcaaataatttaagctcttgtgtaaggtgacagacgtgctgactgctatgtgaatagatgggttgggagtcgggggcatgtgaaattgtaattgggaaggcgaggaggttctcggctgttgtgcaggtgagagctgacagtgacttgggttagggtggtagcagtggcagagaggagaagtggttgggttctgaatgtgttttaaagttgtaactaacaagacttcctaacagattggatttggagagtgaaagaaaggtgggcacctttctttcttatagagggcacccaggtgtcagccccaaacagagacagggtccatcccttgtactgtgagaaatccagttctaccctagtccttttatttcttgtgggttcacagcagcattcattttttttctgatttcctcttgtttttttccacttctgcttatctcttgatctctgtgtctgttctttgtagattttctctctactggtatcagcatttctcctctatcactatcattcatgtatttccatctggaatcattttttcatataccttgtctggttttgttcgttgttgtttcaggcaggggaataaatccggccctcagattgagggttttgggagtgttactgagaattatggatgtgagggatccttctgccccatttgctccattctggataatcccctgtgcaaactcatgtcagtggtaataagtgacagtctgttagaggccacaaagaggagttacattactttagagaaagtagcttaacactgagatgtcaacattcagtgcctcttgcttcccaaaatttctcagtttcccaggggcaatcttttcctccaccacatggtctcttgcctagtactgagccctctttttctggaccaccgcacatcaccttcatttttctagcacactctcccatttttcccagaaactcaaactttctgcttgcattttacagaaaaattattttattcatcccttcaggccatgtgctaataggagcatcatctttccacactcaggtcactcaggaattttcctaaataaagaacatatcctgagataagaatttactgaattttaagaatttagctgctactttttgctcgcctttttttttttttttttttgggagatctcgctctgtcacccaggctggactgcagtggcactgtcttggctcactgcaacctctgcctccaagcgattctcctgcctcagcctcctgagtagctgggattacaggcacatgccaccacaccaagctaatttttgtatttttagtagagacgggatttcgccattttgtccaggctggtctcgagctcctgacctcaagggatctgcccacctcagcctcccaaagtgctgggattacaagtgtgagccaccatgcctggcctttgcttggctattttgcaaagctcctagcacatacacacatgcagattgtcagaattcctgggaattctgggaaatctgggaagcatgctgctttgttttcagtgcatttttaacttggccatgatttcctattgctgatatttttttttttttgaaacggggttttgctgttgtcacccaggctggagtgcagtggcgtgttgtcagctcactgcaacctctgccttgcaggttcaagcaattctgcctcagcctcccgagtagctgggattacaggcatgcacctggctaattttgtatttttagtagagagggggtttctccatgttggtcaggctggtcttgaactcccgatctcaggtgatctgcctgactcggcctcccaaagtgctgggattacaggcgtgagccacaacgcccagcgatattcttgtactaattaatatatgtataagattactgctcactcttagctttggttgattgttttgtcctgtgtaattgcttggttaccattttgattgttttattccttaccaggtcttttttctagagtcttgtccctgggaagtggagccagcatggtagacagaacaaagttgcagttgctccagcatttaacagagatgagacctggacacgaataatcgtaacacaagatgggatgtgattcagtaatgtgagacagagtgctgtgggagtttagggattgtttttgaaagtgaggttgcagtttgtaaaggtttttttttttttttttaaagtaaaatttgcaaaagtagtactgccttttggaaacaagtaaaatgctactaactgtatgaaataaaacacgaaagtctccttccttcccctactcccacgtcccagtgtaacccatggttcgcaataggattcttccagaatgttttctctgagcacacacatagagcattttttttaaaagaaataagatagtagtagcattatgcatttttaaaaattttaatttgttctttaaaaggttatacattcacatagttctgaattgaaaagatacaaacgtagagtcttcctcctgccttttcttcccaactgctcagctcccctccccagagatagtgctgccagtttcttaagttcccttgcagagactgtttcttcctatacatactcctacctaccctccttctcttatttttttacacaaatagcatcatactttacactctgtaccttggttttttcatacatgttgtgcattttaaagatgtagttcaggtgccacctcaggcatgtcctggcttccttcctgacaagtatgaagcctcttatgacaatctagtgacatggaggcagacctgcatgatgtcctgggtttgtgacctgaggtcccaaggactagagggcaaggtagcagcacctggtcctcatctcctcctggcttaattgagctttgggggcttgcgtattgtcttgagtgtttggttgaacctgtatatcctgttggatcaatcttgatattgcttccttttcatttctctcgatgaaggccgtcttactgaatcttgtctgctggggaagttcctcattgctgagagcagcagttaaaaaagctgttagccacgtggctgggctcctatttctgcagaggcaggctgagttacagcttggtggtgtggatccaggtaggaattggtcaacattctgaatcctgagctgccatctgcctcgtagcctgctgggatgctcagtttagacaacatataaagtttcctggatacgggacaaacccaggcctatggaaagagcaggaaggttaaagtgtgtggtactttgggcaatgacgaaggcgtaaccagggagctgacatgtttgctccaaagccaagaattccaggacaatttgttatccagctgaagccagtgtagttgctacaaaaaagcctggggacaaaagcatgctttttacttgtttccctgtcttcttgcacacctactctattttctaaagctgtagtaaaggttgctgacattggaaatgtttgatgatttttgctattctcctcgtaaatgaataagagtctgggctcaggccaaaccatggctctatgtgctgaaagtatcagcttcctgaaacagcttcacaaatgctgacatttcactcagaccaggagggtcaggggaaaggcctaagcaagtactaggttttatcatgaaagaatgatttcaacagactaaacctggtctgatggcatcaaatgcccttcccccacctttttttttttttttttttaaagcattattggtcagagaggaaatagaaacttgggctgtcagatctgaagagacccacatagcatgggactggtgtcccagaacattgcaggtgtgtgaatgcatgaagagttgcatccaagtgctattgcccagcttgtttgggcactgatggtctcaggtcttctttcaggagcaagggtgggagacatttccagtgggtcaagatactagtcagtggtcataacttgtaatgtgaaaagcagtctggggcagccttatttaagcttgcttagtggtgaagagagaggagaaggctgtagccttgcactgacgcacctctatcaccatactcagggacactctgtgacacagatgagtggggtttttttttttcttttgtaaaactttggttttatacatagtagagcttttctctctctctctctctatatatatatatatgtgtgtgtgtgtgtgtgtgtgtatgtatatatatatatgtatatgtatatatatagtattcttttctttttctttcttttttgagacggagtttccctctgttgcccaggctggagtgcagtggcatgatctcagctcactgcaacctccgccttccgggttcaaacaattctcctgcctcagcctcctgagtagctgagattacaggcacgcaccaccacgcctggctaatttttgtgtttttagtgcagatgaggttttaccatgttggtcaggctggtcttgaactcctgacatcgtgatccacccgcctcggcctcccaaagtgctgggattacaggcgtgagccacagcacccagctggtattatttttcatttagcataatagtaactcatttttcctgtattattgcatactttgtaaataccaattttaacagcaggatgctattccattgttctgagtttgcttctccacattgaaagtgcttattttacaaaggatttttcttagctctatttgcaggacagaattgtctgcatttgcttccccctaacacatcatgtttgtctctaaactttattattattattgtttactagtcatcttttatttggaggtttattttcatttggataaaaagattcagcaatgatcacattcctcatggagggattctgggccaaggaggttatggtcaagagtgcggagtgtgctctccacactggcccctcttcggtggttcttatgtttgagctccttataagaaaggcagtggccaaaaggcacgtaagctgccagcaccatggaaaccctggtgacactcccttttttcatgttgtcatgcttgttgtatttaatagtatctgtggtaacctctttgaaacgcttcaacaatgcctttggtggtaaaatcagtatccagcttggcagctctactaatatgacatccatgaatgagtttcttcttcattggtatgactgatgccattgtggagtcctggtgtctgctgtctctaaactttaaatggtggttctcaaaccacttaccagtctatgtttgtaattaaaatataagcttgaaagtgaatagaagcccttcccaaaagcatagttaatgacattatcctggcttgcacatttgctgaatggaaagctctttttggctgatatgatgtcaacattactaacacccatgtccagagacaacgttcattggcatttaacaaagcctttctggagataattctagttatgttctttaaagtcttgggatgccacattttcaagtagatttgttgtctctactttagatcagatttgaaaggagaaagctcttagtctttcttaactctaccaggaggttgggtgcggtggctcacgcctgtaatcccagcactttgggaggccgaggcaggtggatcacaaagtcaggagtttgagaccagcctgaccaacattgtgaaaccctgtctatactaaaaatacaaaaattagccaagcgtggtgacaggcgcctgtaatcccagctactcaggaggctgcggcaggagaatcgcttgaacctgggaggcggaggttgcagtgagccaagatcatgccactgcactccagcctgggcgacagagcaagactccatctagaaaaacaaaacaaagcaaaacaaaacaaaacaaagactctacctggggctgtgatgtgtcttttgggaagaagggtgggattataatctcactccggttagagaaatgatgggtaacctttaacaagttattcctcttttgggggcttcaatttccacatccgtcaaataagattgagctggaacaattaataaggctcctttcagcttaaatatttttagatttttttctaggcagttttttaagccaaaccagccctacttttatatttatatgtcttctatagccagttgttcaatccctgcaagagagcaagctctcctgtccctgggtttccatgtggacttcaacgaagtatgttggagaccagtgttctatcttgttgaggactttccaagggttgttctggaaacggaaatctagcccagatcactccaggggactaatccctgaataattctgtccccttgacacgcacacatattttctgatgtttttcttgaccttggaactggttaaagactgcatagaatgttcagtgaattcttgcagactgccacaaagaagtccttcccatccaagatatgatttcccccccaagattgagattattttggaagtaatccttctattgttggaggcagtttaaggatgtcaccataaaatggactttaccttgttctttttctgtttctctccgttgcgattcagtttttacgtgttcatggacaaggagacctgggttatttttggataactggcacagggttcaagagaaatacagaattatttcatggaataaaccctagattgggaactgggagagctgctctcgctttgtgactttgaacatgttgtttatattctctgggtctcagtctcctcatagaagttagaatgatcttgctagaaaggacccttcctctagcacagtggaggggaatttctctcccgccttaccatgccccaaaggcactgtgggcagcaatggtgactgttacccacccagctagccagtgtgactcagagtggccgtgcttgagtcacatattcagtgttgtcagtggctgtgtcaccaaggattgccagaggcctttgctattttcccacagctaacaacctgacaggatagggtcagcagcttctagttaacagctggccaaaagaagcagggagacatctctgcaggggaggaggttcatgggagtttgttcaagcaagagaggctttttctctcttggtagtttgttactgcagcaatagaaaacgaatgggggaagcaacacagagcacacagtcactcaggagctgggaggggttgccagtgcgcctccccttcatgaaaccacttcacttttttttttttttgagatagagtctcgctctgtcgcccaggctggagtgcagtggtgtcatctcggctcactgcaccctccatctcttgggttcaagcaattctcctgcctcagcttcccgggtagctgggattacaggtgcctgccaccaggcccggctaattttttttgtatttttagtagagacagggtttcaccatgtcggccaggttggtctcaagctcccaaagtgctgggattacaggcgtgagccaccgcgccaggccagagcttcactttttgtgcatctctctctccttggaacatttgctgtactgatgactgggtctcagtgttctgtgtttccccacatacaccacaacgctactcttgtgagctactcagaggcctaagcatcttggcctgtgggacttttattctctaagacagtggtcctcagagtgtggtctgtggcccagcagcaacagcatcatcagggactagaaatgcaaattctttattcccacactagacctactgagtcaggcacgctgagggtggggcccagcaacgtatattttaacaagcactccaggggacagtgatgcgtgcctaagtgtgaggaccactgtgccaggagagggacctgcaaatcctgacagacaacaggtctcctaatgcaggtacccatgggccaaggagccagcagccactctcctgtgaccttagtgcccagccagtcaagagcctgtctcagggtgagaacatcttcctcccttccacagccccttgaggggtcacctttgtacagtctgactgagttagacacgggagagctgctgagcttgttgagtggatgttttatctccttagccaagactccattcccagaatgaagacggagggaagaatgcttttccatatgttcttccaacaagtcatatgacagatgaggaaaccgaggctcagagtttaagttactcatccaaagtcatgctgctaataaatggcagagtcagaatttggacccacgtccatctgccctccagtgtcctttctaccgcagcaacttgcatcccttgaccagagccagctccaggaggatagggcctggctttttctggatttgagctggagccctcactgaactcttgaccttgctgtgggaacctccagctaagcttctcagacactgggaggcaggtcctctccttgctttcaccctgtcagcacagcgggcatctcggaccatgctggatcccgtcagggatgtggcagctgccagtcagttaagtcacaagcctcagcaggcctgaatgatagccaaggtggtcaccgtgccaagtggattgcagccaggaggtgccttgcctagcccacccctcatcctttatttggaggcccctcaccatctcaggcagggtcttcttcccccagcagctgctcagagcttgccatgcaccccctggttcttatggtagcccagtttagcaaacggacctgaagttttataaatagcgcaatggcaggctgggaagctgtcctgtgtaagaggacagaacatgcattctctgctcctcgagccatttcctgggatcgggtgatgggagtgacttctagtgcagataaagtcgaattactcttatcttctaggtctatactccacacttggtcttgcttctactgtttggtatgtctgtggtttccccctactgcttctgcctttatgtgatggtgcttccaagtctgctcccgggacgtttcctgttcttggaacagctgcaccagcctggggtaccctcctgctacttgatcctatagggaggtgtccagtggctgtgggcaattttcagatgaccttgttcgtctgacgtcattagatcgctatttttggctttgctgtttatgctgcagaagttgggctggaatgggagaggaggaatgaaggaggggctgctcttggtttcccattgttccagggtcctaccaagtaggtgcatttattcttccacatttacagagcacctactgaatgtcaggccctagggcaaccaaactgattcttcactcacttatgaatttatttttcaatgggcattgctttgtggtacggagtagtaattaaatgtgagggctctggagcaagagagtttggatttaaattccagcccgccatttactacctctgaaactcctctgtgcctcagtttccttttggaaatgggagtgattatagtatctacctcataaggttgctctgaagattaaaagagttaatatctctgtctgacacattgtaaatacacaatgaacgttagtggctattactactaaccacaacagcaccacgtattgtactaggtacttgggatatgaaattgaatgtgatgtagtctgcatctgttttgcactggcatctggactccaagggtctcagatattgggatggggtacccagtcaacaccgtcagaaagaatacctgctgtgtgtactatttttcctaccttatgttggagggcattcaagggaaacagaaattgaagtttctggctgggcgcagtggctcacgcctataatcctagcactttgggattatagggaggccaaggtgggtggattgcttgaggtcaggagtttgagagcagcctggccaaaatggtgaaaccctgtttctactaaaaatgcaaaaaattagctgagcatggtagtgtacaactgtaatcccagctactcaggaggctgaggcagaagaatcacttgaacccaggaggtggaggttgcagtgagcagagattgcacgactgtactccagcctgggtaaaagagcaagactccggctcaaaaaaaaaaaaaaaaaaagaaacatacaaaaaagaaaatgaagttcctgtcctaggaaagccttagatcagtggctcttcaccctgccacacatcagaatcttttggagagatttttaaaaataccaacattctgggccccactccaaatgttcttaattggtctgagctgaggaggggctcagacttcaagagttgtagaaactctccaggtgttttcagtgtgcatcagggttgagaagtgtggccctgggttatagggatatgaatcctggaagctctccactgactgcaccagggtgactgtcaggacagtgcctcaaatctgttccctcttccaaggctctcaggatgctttctagagagctggctctctgacttggtggttcttgaacttggatgtgcatgaaaaatcacctgaaatgctggtttatagacatttctggggcctcattccaaggaagctccattttattttttattttatttttatttttgagacttagtcttgctctattgcccaggctggagtgcagtggcataagcttggctcactgcaacctctgcttcctgggttcaagtgattttcatgcctcagcctcccgagtagctgggattacaggtgctcaccaccatgcccggctaatttttatatttttagtagagatggtgtttcatcatgttggccaggctgggcttgaactcctgatctcaagtgatccgcctgccttgtcctccgaaagtgctgagattacaggcatgagccacttcgcccagccaggaggcttcattttaaaccaactctggggcttagttactgagaaagccttgcagtagctgaattgcgagttctctgaggccctgagccaagaagtcctttcatggtgttttatagctcttaccattttctctctgaagaaatctgtgtccacgttgatatatttggaattacttattgatctgattaagagttacaagtcatttccaaaaaagttggaaaatctagatgaataaagaataaaaataatctctatttctacgcctgtaaatatgtccatttatatccctccagccatcttctttgtaaatattttgaacaaaaaggatcccgctctatggctgatttttatttaatttatttattgagacaggggcccaccctgtcacccaggccatagtgcagtgacacaatcatggctcactgcagcctcaacctcctggtgtcaagcaatccttctacctcagcctcctgagtagcttgggaccacaggtgtgcactgccacgcctggcgaatttttaaatttttttgcagagatggggtctcaccatgttgcgcaggctggtcgtgaactcctgggctcaagtgatcctccagcctcggcctcttaacatgctaggattacaggcatggttgatttttatagtcttttttcacctaaaatgtaatatgcagtgattctatagctctcccccaatttcatctctgtgtcctgaaagtgaccagtttagtccttgtcacagtagagcccccagtaattaatcttagcaataaaattctataactgtgggatggaacagtgtgtcaattgcgttttcggagaaacctatgtccaatttgcacacagaacgcccacagacctctgcttactagcttggctggaaggacagggtctgctgtaaggacagcaaccttacctagggcttttccagaggcctgagaggtcctgccaaggccctgggctcaggggtccaaggtgggagagggcgagagaaaacaacgtgctaatgcagccttgagtggctctcaaacaggagcagagggaaggctgtgaggggagttggctgctctctttggagtcagaaaggttgttgctcaactctttggattttccatcacagctgggcagggagagggtcagactgggcatgacttctccgaacaggtccttttaaagcctcttggctgaactgatttcctctccagagccaaggaagcagtgcctgggtgaagttaaccccttcacccccaacacattcttccagagctaggtgagcctggaagcctaggctcctggaaggcagagctacacagggcaagaggcctaaggagccgtgaactctggctggagaaaccttccctctggccttgttaaatccaacaggcataattgcatcctgctgaccttaattcccctggcgggtttaattggtcttggcattgccccacttcctgtcctgcccctgtagaggcaaagagggtgtctgcacagctggtgcagggcggggaagccccttcttgagggtgggcaggggctctggcagcccctaggtgggtggaggaagtttccccgtgccccacccctgtgcctccaagggagtgctgagaagcttggggactcccagggagcagctggctggagcaggcagtcccgtagattcggaaccaggccagactctcatcccagtgggaggcactgcaggggagctggcgggaacagatgaaccctctacctggggtgtccacgacattatcaggcccccacagtgctgtaggtactgtgccattgggcactctttacatgtgtgctggctaaatgctcgcagccatgctgtgagagggaggcaatggggcagagcagttatgagcagagccttgggttagatgggtccaatcccaactctatgactttgccctgtgactcagttttcctgtcacatctgtgaaatggggattaaagagctgacatttatacagcactcgctatgctcacactcactgttgtaatgctttatctacctcctgggaggcagatgctctccttacggatgaggaaacaggtgaagacattgttccaagctcacagttactggtcgcagcgcttcattgacagatctcctaatcactgcatggtagggagttgtaagactcgaaggaaggatactcatgaagctgcttaccccagggcctggtccattttagaaagagttcaataagagtaattatttgggaataataattataacaaaagtagcactaatgcccctgaagttgtcccaggctggattttggtctcattgggaggtggctctggatttgaatgtgggtagtttgaagccattcactagctgagtgactgtggggacaagccacttccctctgtgagcatcagtttccacacctttaaaatggtgtaacattggcccctacagtcccttctgaggatccagggagctggatctttggcatagtctggcctggccgttggtgggcactcaataaatgactggtattgataaccacaataataacaaggagatgccagcaaggtccagcatagggaggtaacaaactccagtctggagccttctggttaatcagttatttactcatcagacactgatgggcaagtccactctgtgctggggatgtgtttagcccctggccttcagggggctcccagacagtgtcaaccaatggtgggatcagctggggcactgtggggaggccagaagcaggggacccaacattccaaattaaactaaaacatgctctgggccagatagagggccaggaggtcctaatgatccgcattaggacaggaaacatttcaaccttttgaatgctgcaagatccacaaaggggttactcagcagggagaagggggcaaggcacaggctgggacattttaggaagggaagagggctttggagtttgaagaacgacattccaagctcaactcccttccttgctgagtgactttgggcaagctactgattcctttaactctcctcgtcctcatgcagaaaatgagatgagcgctccccacagagttatcatcaagatgatgcttaaaggcaagatggctaaaacgaatgacaggtgctcagcaagtggaagctccctttctgcaggggacctgggttcagagctcagttcagccccttccaagctgtgactttgagtaaattacataacctctccatgccttggtttccccatctctctagtacctaccgcactgggttcttctgaagaccatttgggtggatcaacatgagagcatgcagagcgaggccaggcacgtggtcagtaccgtataggcatcagctgttacttttgcttcctggaagaggcagactgttaactggaccttaaagaagagaaatggaggagaggaggaccgggcctggagaggagggccaggcagagcaaaagtagtcaagactggggaaagagctccaactatggtttttaccagcttataccaaaaacccttgacatttgctcacaaaacaaaacatcccactcattttgaatagtagcctgttcacatagttcatggttcaaacagaaaagtcaaagtatatacagtgatgtctccttcccacccttggggcccagttccttgcttatcctaccaaataaattcttatgtgcataaagtgaaatatatattattcatatattattctcccttttttttttgcacaaatggatagcacactctacatgctactttgcatcttgctttttttattccccccactttggtggtcactttttgtcagttcattaacagcttcctcaatctttttttacaggttcctatttccccactgcttagaggggctgcattctccctcctttctctcatcaagcgtttttccaatggcttcccatttgacagaggagccgaggccatggagtgaagtgactggtttgctgcagtcaggacctgaacctggataaccactctacagctacttcattttatcttactttttaaaatataaagacggggtcttgttatgttgcccaggccagtctccaactcctggcctcgagtgatcctcctgcctcagcttcccaaagtgttgggattacaggtgtgaaccactgcttctggcctctacagctacttctaatgcacccaggtctggccagttctcaagagccccctctgagaaaggctctgggtgatggaaggctccttggatcatagctgtcctcatcctatctcgaacacctcaggctagagtgcccctcgggccacccctgtagtggagcatccttgaaaagactctctgccagcccccttcttccatgtgggtcatgggtgagaactggatgagcttgggggaggggcacagagcactctccatctcccatggctactcagggcagcctccgtgtccccaggagcccaagaaaaggacagtttcaaaagaaaaagcttccaggcctatggacatgttgagaaagtgcccccgagacaatttcttacccaaaggtgacgcaagcaggtccagatgtcgaggcacagagctaggcactagggtcagggagattatccctgggactttgtggctctagccaggttctggggagccccaggagatgtggcacacaggtgggcagaccagggctcagcctgggcatactcttgcccttcaggcctgcctgagtactccccttcttccaggccccctctgatcctgtccaagtcagggatactgagcaaggcctggggaaagggctgctcccccagcgtcccagatacccctcccttttctcgcttgttccaacatcattctccccccagtcgggccatgggaagaatgccgtgtcctctgaactggggccaagagtgacaggtggcggcagtcccagctgcatggcccctggtgtaagagatcctctcctccgtccccgcctccactgcccacacccctgcctccgcctctgcccacccggcccaatcccttacaactgcccaggactgctcctgagcagccgctgggagacagacggcaaccaggttgcccctctttgctccaggtacctctctcccctcagttagcaggcctcggcttcctgtctcactgcagccagacgagaggggaaattggacagcctgacacactccactcttgtttctgcagctagaaagacttgagttagacaagcagcagcacacgcctccctacctcatggcgacagaaaatggagcagttgagctgggaattcagaacccatcaacaggtgccaagctggggcaggagatggagggaggagcttgggaaggggggttttgaatccaggactgggcaggttcctcagtgggagttctgtgccccagccttgtttgcatggtgcacgggggacccagaaatcagaggaatctctggctagggttgggctgggtccagggcctgtatgaagcccttcctggagagaccaggaaaatgtgaagccaccagggatggctgctggggatgcacctaaacagtcagggcaaggatgatgggggccaccaaggcccacccaaagggctggaagcctcccacagaggccctccaaggtcgtggcagctcatctctaggggccatcaagtggccccagagactcagtgggacaagcatttgcaagttgttgcctgggtgggaacctgggcccagagctggtctctgcccagcctgggtgagagggaaggaaaggagggtggatcctgatgggtgtctcacctcctctgcagacaaggcacctaaaggtcccacaggtgaaagacccctggctgcagggaaagaccctggccccccagacccaaagaaagctccggatccacccaccctgaagaaagatgccaaagcccctgcctcagagaaaggggatggtaccctggcccaaccctcaactagcagccaaggccccaaaggagagggtgacaggggcggggggcccgcggagggcagtgctgggcccccggcagccctgccccagcagactgcgacacctgagaccagcgtcaagaagcccaaggctgagcagggagcctcaggcagccaggatcctggaaagcccagggtgggcaagaaggcagcagagggccaagcagcagccaggaggggctcacctgcctttctgcatagccccagctgtcctgccatcatctccaggtgaatatcccctcctgggagtggggaggggtcctgtggttctgtccctaggggtcctgcttaattcccttgtcttaggcatggttatcatcacattcagtgctggggagtgtagttctgacattcagtttcctctgtcctgtgaattgcctctaccgccttgtcccctgcagaaaccagaaccctgccacaattcatacaagactggagtaagagagaccctcaaagactgcctaggttgaacatatcttctctaggcttctggggtccgaagttccccttactccatgggcttgggtctagccaagggcagggttgagatggcaggcagaaaggctaaaggtgtcaggcaaaaggctgtgtatttcctaggacatccagtattttcctgttcttcttaatataattattggtaagatatgaaaagatgactaataaccagattggaggatcattgataatattttcataaccataatatagcacatgtgtgatgccatcagttatacttacctgaatgctaatgaggtcattaatgatatattgtaagccacaataagaacatttaccatatcactttgataattatgtatcaattatatcacaacagattttatgaatcaagagctacataactccctagttgtatccacatgatgattaaccatatcaacaatcctattaatagttattaatgatgtattagtgtgttggtagtcaagataatgaccacagccatgaacatcccttaattttgtaccaggtgaatttggctgtattacaccatgcatttggggtggggttggattagctctgcagattgcattgagacttgcctgatgccacaggctgtggccgctgagggcttcacctctgtgttctcaccttctagttctgagaagctgctggccaagaagcccccaagcgaggcatcagagctcacctttgaaggggtgcccatgacccacagccccacggatcccaggccagccaaggcagaagaaggaaagaacatcctggcagagagccagaaggaagtgggagagaaaaccccaggccaggctggccaggctaagatgcaaggggacacctcgagggggattgagttccaggctgttccctcagagaaatccgaggtggggcaggccctctgtctcacagccagggaggaggactgcttccagattttgggtaggccaggggcaggtgggggctggggctgccctggggccagggggagggaagggggctgtcagtcccaagtctacctattcggaggtctgaactgccctgagccaagccttacccaggcccattcatctaagggtcacacaactccagaaagtattccttttttaacgtatgtttattcatttgtttatttgttttaaaagatagggtcttgctacgttgcccaggctggcttcaaactcccagcctcaagtgatcctcccaccttggcctcccgagtagctgggactacaggcgtgtacaaccatacctggctttcttcaatcttattttttaagatgtatttttatttttaaatttagtattcccttttgatagatggggaaaggaaggctcagaaaaaggaaaatgaagtgcccaaacatatccagtgaagacaggatttgaacctgtcaggccacccagactccagaacccacttttgagttttttctactttgactaaaatgaagttaaaaaaaagaaaaatcaggcagattattggagcaacacaaactccctgggcaatggaatttggagtcaatctgtagaagggctcaaatgccaggcttagtagctaaactgtatagtggggtggggtcgtgggagctatagagggctcatgcgctgaggagcacaggtgcctgtgtgtgggagcagtgaccaaggaagctgggcatgtgcaatggggcaggactgtggagtggccttcattgatgattagacaagcagcccgtggcttgttcatgggctgcagagagcactgagtgtgagtgagcttggccagcaggtgaatagggaaagggcctgggcaggggtgcggcagggctgggggtggggtgagatggggtcaggagaacccagagtgtcctgacacccccctgcctccaggctgaagtgccctgggagacccgccagcctgcctggtgagcggcaccgtgccacccagacagggtgggaggacctggcggctgggcggcagccaggagccctgcctccgcccctagcagccgcagagacctccgccccgccccgaaatcgcatcctagagtgacaggatctgaaccacctccaaaggccgtttgatttatcaccagcccggcttccctgccgcctcttgctatttataaagaggtttccattcctgatgaccgcctgccggcctgccagccttcagggcgagcggttccccacacttgccgctaggtggcgccctctccccaccaaacagcacggtccccggtcccgccccgccatgggtggtctggccagattgcggtgttattaggatggagggtgggcaggtcccaccacctaccccattattcagacatagcaaccccactgcctggcattccgctttatagctgctgtgtttgattgtttttggtggaaatgcagatagcttgggatggagtccttgtgtcttataatgcagagggtccaaaaagtccaagctcccatcccgtttgttctgccaggagaagctggtcctccctgataggagtgttgtgttggtggcagaactgatattggaaactgggccccatagcccctatcctggagccaggtgtcccccaggtatcacttggtgaacttaacttccctagatggggcccaggccagcaggaggggtggtgccaaggggaatcctcagcagcccctggcactgaccatgagggctgtgctctgtcccccagatgattgcccgccacctccggcccccttccctcaccgcatggtggagctgaggaccgggaatgtcagcagtgaattcagtatgaactccaaggaggcgctcggagggtgagatctgggaccccagctgggcactcatggacagagagtacaccgggctcctgtggcttcacatttcccctgtgcaaggcccagacacacaccccgctgagacatggccacatggacatgttcacctctgtgtgggacacacactgtgtgcagctgtcacatgctgatgtgcactcagtgttgctgtcacttactcagacgcaccgtcagccattcagtgcttccgtaggaaatacacagcatttttctgtctgtctcagctccaggcaccacactgaccccctcatggtgattcctgctttgtaaaaagccctgactcagtcttatacctctgcagatcctccctctgcctgaaggtgccctcccccagggcccagggcctgcctgccctaaacctctaagggtcgcatcccagggccatcctccctacacgcctgctcttcctgtgcacgtggtctgtgtggttcaaagaacctgcttcagccattgtcctggcagaacagctcacagcttcaggagggagtcagggctggctggggtgagtgctcccatctcaccaaaggggatccagaggcaccactgggtctgggaccaagttaggatcagagcaaaggatgccactgaccccggtgggctctggggtcccctcacttacagcctcttctctttccagtggcaagtttggggcagtctgtacctgcatggagaaagccacaggcctcaagctggcagccaaggtcatcaagaaacagactcccaaagacaaggtagtgaggttgcgggggtggtggctgcccaggatggggaggggatccttggagtgggcacctctcgcctccctccaccagcgctgctgaacctggggcctggtatgggagtttgttgcagtgaaaatactacacagatagagagatggatggacagccctgcagcaggggcctgaggaccctacccataaccagatacttcagttagtgaacttatctggggacttcccttttaggcatgggatattcatgccctctggttcaattcaacaaacactgatgagtgtgggctctgggccaggccctgtgctgggcactgggggtctgggagtgaagtgggtgtggtctccaccctcagggagctgaagccaaggtaaacaagcctggcctagagctttgcctctagtacccacggcctgggctgggttcagaggaggccacgagcagtgtttgttgaaggaatgaaaggatgcaggcaggtagagtgagggagtctgctgtgtgaggaggtaatagcaacctcgtgtgaccacagctgtgactcagggaaactgcggggtagcattttggggttcaagagagcttctgactcaggccgaggggtcagggaagcttcctggaccagctgccttttgagcgagggctttgaggagacgttccagtggagaaggcaggggcagagtttcaggcagaggggactatgggaggaaaggctcgagggccagagatagcaggaggtgctggggagtgaggttctgggcatcccaggcagaagccacagtgtgggcacaggcccgaccccagtgaaagcgtgagaagcagctctagccgctgcagccctgggtccccattatggctctaagcacactggaaggagtgcattttctatgtgacaacgtcctttttcgtctcttccacttacagggcctgggtccgtgttattgtctcctaggtcccaggcctctgtcacaggctctggctcagcatagatgttcagtacctacctgcggctcaattaactggggccagttttcagttgataattattgagcacttctctgccattcagtgggtcaggggctggggaaatgtcagtgacctaaaaacacccctgccctcatgggctgacatgctacagtggagggagagacaactaaaacataaagcaaaaagaaaaaagaaaagaaaagagaagaaaagaaggcctggcatcaggtactgagaagtgctaggagggaaaataaagccaggtaaggtagagggggtacagggctgatgggggcgcttttagatagggaggtgagatcagtcctctctgagaaagacatatgtgaggtgagaactgaatgaaggggtgggtaaaggcagaaggggagccatcctggcagtgaaacaagggttagtgtttaaccactggatctgggtagggcaggtgtggagagaggcccgatttacagcatttgccatttctcatggtgtaagtattcctattatagccgatatatcagcctaccgatgtgacagctggcttgcgactttctgaaagtgacaaataatggtgtcttaaactaggaaggcagtggtggaggaggtgcgaatgattggatgtataatctagcttgaaggtagatgatgctgaagagttgggtcggaggtggggtgtgagggcgcgagagtaagggaagaacttaggatggctcgtaactttttgtcctgcacccttgggtgaagcgtgggggtacttttgctgccaggcaagccgagagcaactcaattgtggggaagggacgatgtctaaggtctaattttggacatgatagatttgagatgtctattagacaactaaggcaagtagacagttggagatattggagtctagaattcaatggagtgctcagaggttgagatgtatatttggaaattgatgactttggataaaatgtaaagtcatgagactttatgcagatgcccagggagagagcagagagagggaagcggtgaggggggaggatggagatcttggcatgtcagtactcaggagaagagccggcaaaaggaagatgtcccagcaggcatgacttgggagtggtgaggaccacagatgtgggggtgggggagagaggagaggcaaggaggaggctgagcagtgatctgggcaaggctagcaggcctgttcaagggtgcgggtatggagggtgggtggcagggagtgatggtgcccagctggtacccttgacttccctggtccccaggaaatggtgttgctggagattgaggtcatgaaccagctgaaccaccgcaatctgatccagctgtatgcagccatcgagactccgcatgagatcgtcctgttcatggagtagtgagtgcccgaagtagtggtaggggctgggtgggggtaccaccaggcacggagcaagccgtggaggggtctgtgcacacagcatcgagggcggagagctcttcgagaggattgtggatgaggactaccatctgaccgaggtggacaccatggtgtttgtcaggcagatctgtgacgggatcctcttcatgcacaagatgagggttttgcacctggacctcaaggtaccagactggggcctcctgggaagggtcaggggcagcctccgaccccctgagatcagtgctgtcaccagccatccctctgccctcccatccctccatctcttccttcatccatccttcccttcatagattcagaaagggtttatggaatacttaccaagtgccaggagccgggggcacagcaaagagagagagggggggaaaaaaaaaagacgtggtaccagctttcatggaacttctagtctagtactaagtatttgttgaaagggccttttgcagtcctgtgagccccaagctcagtgtgtcacacagacaagtggctaataagtgttgcaatagcacctgcctcagccttggcccatgataggtactaggagtgtctgatcatttattcaaaagcaacaaatatttcttgagggcctactttatgccaggcaatgctctaggtggtggagatcctgtggtgaaccaaacagataaaaatccctgcattcttggagctctcaaataagtatagtgtcagcgtggcaatgtgcatgaggtaggcgctaacaacaatgtttcgtgaaagaatattgatatccttcttcttttttttgagatagagtctcactctgttgcccaggctggagtgcagtggcgctatcttggctcactgcaacctccgcctcctgggttcaagcgattctcctgcctcagcctcccgagtagctgggattacagacacctgccaccacacccagctaatttttgcagttttagtagagacagggtttcaccatgttggccaggctgatcttgaactccagacctcaagtgatccgcccacctcggcctcccaaagtgctgggattacagacatgagccactgttcccggcctgatatccctcttctgaccttgctcactaccatgcacatggtaggtcaggaagagcagatctgctttttttttttttttttttttgagacagaaagtcttggtctgttggccaggctggagtgcagtggtgtgatcttggcttactgcaacctctgtctcctgggctcaagcaattcttttgcctcagcctcccgagtagctgggattacaggcgtgtgccaccatgcccggctaatttttgtatttttagtggagacggggtttcgccatgctggtcaggctggtcttgaactcctgacctcaggtgatctgcctgcctcagcctcccaaagtgctgggattacatgtgtgagccaccgtgcctggccacagataggtgtatacattgcagcaactccagtcagttgtccgtagctgtccggagctgagtgtggagctctgggtgtggagcagggaagggcagcaggagtgcagggggttggcagtcctcatggcaggtgttaatgctgtgcgttaagtggcgggacatggaatcttaatgtggaggcgcgtgagcacccatcagcaaagtggatggtactttcattcattcattccataagcatatgctgggtactttccttaattcattcgataagcacgtgctgggtacctgctcctggaaggccccgtgctaggcatagggactgtgaaggaaatggtccctgtctcatggagcctccaggggaaacagacattcataaaacaattcctaactaaataggtcattttaagccatgaaaagtgtttgagaaaatacacgagagtaatgcggaatcgcactgggtgaaattgaagtcagcacgggtctgaagcaggcagggagatgctgttgccgcctctaacacctgtcccagttttgctctgtgcccgacactgtctgagtgagggtgccatcttcccaacagtcccctgggttaggtgtgttaatatcactgccactgacagaggaggacacaaacagggtgaggaggtgggtttcagtggggccagagtggatgcagggaatttagaggctgatggagtaagtaagccaggagagagatgccaggggcttgagccagagtggcagtgggagaggggagggaaaggggccagatggaggatacattttggaaatagagccaatctgatgtgctgagggtttgcatgtgtgagggttaggaaaagaaaggatcaagggtgagtcctgagttactggacagatggtggccccttcactgagctgggggcagttggtgcctgcatgatgacattggaagactgcctttccctagtgaaggctaatttctttggggcagaatagggtcccccaattaaaatgcagtgctctgggaagaagctcagtcgtgagcctctgtatcctaaaatgtgtttttttcaggataataatacgttttttgtcaaaaaaagtgtttcacggtcaagtaggttgagtgcaccccagcccacaggccatgtcctgggtctcttggctgcagggcttctgagggcctcctgtgtgtagatggagaatctctgaaaggaaatttgagtctgcttcatttccccaaatgcttgtaccctgggacccttcttttctttcctgttttgtgggacaccaggccaaactattaaaatcattagtatctgctctgagtgaatctatcagttttaagagtgccttcagaaagcgtctccttaggggacttgagtcaaatgcccacagagcccagacaaataacaaatacatgttgaatgggagggatcagggggtggtggcgaccatgggagagttggaggacatttgtctcatctcaggctgttagtggcaacttgttccaaggcatatggcccatgtggccagggcttccggtgtttcaggagctgctggaattcagggtttttgtgcagaatctcctgcctttgaaccattgttaacttaaaaatgtttataccctgcaacctcagattagtcctgtgtccttgtgtgataggaagaggaaacagaggcccagagtggagaggaactgggcttacagtaacgtcatccatgtgttaacttggctgagcccctactgggtgcctttgttagaccctgagggtgggacccaggaggccaggagaagacaatccctggcctggaagagccaaccctgtagtgttatattcaccccagagtgcaggatcagtggtggtagcggaacatcacaaggccagtgctggagtcagtcatgcgttcatttcctggctccgtcgcttacttgctgggcaactgtggccgagtcacttctgtgtctgagcctcagctttctcagctgccaaatgggaatggatggtaatagtatctcaatgtcacagtttcatctcaagataacagtgtgtgcctcctagatctttgggaaggactggggagctaaagtgagaaagtgagtggactgggcctgatgttttgtagctcatcatcctcactaactggggagacaagagtagcgcatcttccagtgaccctggagtagtgtgaagccccgtgttcccaagaggcttcctgtcaggaactgagctggcatcttctttctctgttctctggagcttcatgtatctggtggtggtcctgcactggccccccagcctgggggcggggatagcaggctgtcatgcctcctctccacaggcttctgtttccccatcctcagaactgctagaatgtcgtgttctttcatggccttagatggagggaaatctcacctgaacccatcacggcaggtcctgtgcttcaaggcctcgcataagcccctcgtgggggacttgcctcaagatctctctgtgcccagagcaggcagggctggagggtctctggcagctgcccactctggcagcttgggcctctgcctcaaggagcctggggtttgcacgggcctggtgggagagggagggtgagctggtcagaggcccacccaggccaccccctttctcctcagccagagaacatcctgtgtgtcaacaccaccgggcatttggtgaagatcattgactttggcctggcacggaggtaccacctgggtgggtggggagggcaagacaagcctctgagttggcaggggacaggggtggggtggagggggcatgggtataggccaggagctgtgctctcagcccttggtctcacccccaggtataaccccaacgagaagctgaaggtgaactttgggaccccagagttcctgtcacctgaggtggtgaattatgaccaaatctccgataagacagacatgtggagtatgggggtgatcacctacatgctgtgagctcccaggcgggtcgtgtttatggggttggtggggcatgggggcgagcggccgaggccaagattggccctagggtcttggtaaggtggtcccacctcccctatccctcagtcaggggtttgctggggttgggagtgctagggagaacaggaaaggggaacgtggtacccatttcatagatggaaaaaccaaggtccctataaaggcatagcatctggacagcagatctcggatgacctggggcgggcagaggggcagtggacatttcctatgtgctcaccacataccttgcactcgtcattcctcatcactgccacctaggaagctgggatgattatgcccattttacagatgagaagagtgaggctcagagaggggagatgacttacccaaagtcacccagccagattcaaacccaggtctgtcccacgagaggctgggggtcttttcagcacacggtgctgcctcctaggatctgcccctgttccctacccctctgaaggtgactcagcacctccaatctcacctccctgccccctgctatcccctccctctaggctgagcggcctctcccccttcctgggagatgatgacacagagaccctaaacaacgttctatctggcaactggtactttgatgaagagacctttgaggccgtatcagacgaggccaaagactttgtctccaacctcatcgtcaaggaccagaggtgaggctcaccccagaacctgaactgtatgtgtgcaagcttagtgtgtctgagtgctggcagggcgggagccaggtagagaggccagctgagcccctggggcctcacgagcatgcagcccaccgtcaccatgctgcctctcccccagggcccggatgaacgctgcccagtgtctcgcccatccctggctcaacaacctggcggagaaagccaaacgctgtaaccgacgccttaagtcccagatcttgcttaagaaatacctcatgaagaggcgctggaaggtaccgctggattcagggtggggagggagggcttgctagtgggaagagctcctggtgccagatcccagcctccaccgtccctgccttggcaggttctgttgaccaggctgggccctgtccggaagacagggttgacttttctgtttttgccctgggctggctcctgtcctagagtggagacctctacccggccttccacccagccccacccatctggggctctggcttccctccttcatttttcaaatatttcttgagcatctactacttctaggcattgggatataggagtggacaaaagagacaaagatctcagtctttgtggagttacttttggtgagagatggggcattttctatctttttttctttctttcaatacagtcttgctctgtcacccaggctggggtacaatggcgtgatctcggcccactgcaacctctgcctcccaggttcaagcaattctcctgcctcagccttccaagtagctgggattacaggcacccaccatcacacctggctaatttttgtatttttagtggagacggggtttcaccatgttggccaggctggtcttgaactcctgacctcgtgatccacctgcctccgcctcccaaagtgctgggattacaggcgtgagccactgtgcctggctgaggtggggcattttctagagccctgtggaaataggcagggttaaagaagactttagaaaaaaaataagggccttctgccggggagaggttgcacttttatttttattttttttagagacagggtctcactctgcctccccagctggagtgcagtggcgctatcatggctcactgtagtcttgaccttctgggctcaagtgatcctctcctttggcctcctgaatagctgggaccacagacatatgccaccacatccagttaatattttaaaaatatttttgtggagatgaggtctcgccatgttgctcaggcaagcaatcctcccgccttggcctctcgaagtgttgggattacaggtgtgagccactgtgcccagcctgcacttctaaatagggggggtcaggaagggctcactgagaagcatgtgaacaaagacctgaaggtggggaggggtgagccgtgccaatactgggagaagagtattccgggcagagggagtagccagtgcaaaggccctgaggcagaggtgtggttggagagtttgaggaacaggtaggaggccagtatggatggagtggagtgagcaaggaggtaaggaatgaagttagagaggaagagggggacaggagttggagggactcatcggccatggcaaggggtttatcttttacttggagcaaaactggagccatgggagtgtttggagcagagcggtccttggttcaggtctggctgacctatccgttgagtgaggggactcctggacaatacagtgtcatggcgcctcccgtggccattttgggcactgcaccttctctagcctgtgaccctcctggactgaaggggacttacaggctgctcagacaccctgcagctgcccccctgccctggtgttgactgggactccctctcttctgccctctagaaaaacttcattgctgtcagcgctgccaaccgcttcaagaagatcagcagctcgggggcactgatggctctgggggtctgagccctgggcgcagctgaagcctggacgcagccacacagtggccggggctgaagccacacagcccagaaggccagaaaaggcagccagatccccagggcagcctcgttaggacaaggctgtgccaggctgggaggctcggggctccccacgcccccatgcagtgaccgcttccccgatgtgagccgcctcggagtgtggcctggatccatcctgctagcacctccccagacagggctccagcctgtcggccacaccccagactccaggcccccgttgaagccgctcccggttccctccccagctcctcgtctttgaactgccgccgccgtggtgacccctgctttgccccactgggagagtccttagcctgggcctcctcctagctggagtgccatggctggggggtctcagcatgtagggcttctgtggttgtggatgggaggctcctggtggggcagaaaggctgcaacgctgattcctaaggcccagctgccagggaagacagagcaggctttgtgagagaggacctccatgcccccgccacctccccactccagcagataaggccgagcccacaccatctggcccaggctggcccccacccaccttccttgcgaccaccaacacacaggaactctgtgtgagagagagggcgcccagcccaggcctggtggagggggaggggagaagccaagggacacaggagaccacccccgagcttgcctcagggccaagccggcccaacccaaccactcggggcccccatcttgggggtcacccatggcctcagatgatggggtcagcaggcccaggagaattaggaaggccatggggcagcctccagtctgctctcagcttgtgccttgtaaataaatgtacaggttggatgtggcctccttccctctgtgtgtgcctgcactggtgtgaggtcgctgatgaccacagttcactgagcacctactgtgtaccggacactttagcaatatccgtcagctcacagtttggtggttcatgcaggctcaggtgccagtctgcccagcacatgatgtgggcaggtggcttctgcacgttgtgcctcagtatcctcacctgtgagagggaggtcgcagcaacagcctacaccgggtgtgtgattactgcgtgcccagctttacttaaagcgcctgtgctgtgttaactcatttactcctcacagcaaagttacgaggcaggattgattggttgattgattgatttatgatggagtctcactctgtcgtccaggctggagtacagtggtgtgatctatgctcactgcacgcaacctccgcctcccggcttcaggtgattctcatgaggcaggtattattattcctgttttacagagggagaaactgagccagagagagtgggcagcgctaggatctacctcatagggtggggccatggctgcagcatcagtcagactgaggtaaggcacttagggctgtgctcggcccagggaacgataatgttcttatccttactccacatatgaagaaactgaggctcagaggagagaaggaacttgaatgccactcaacaagtcagggactggggcttgaaaggagcttttctgtctcccagagcaaggatgtgcccatgcgttccctctgcctctcaccaggacagggtgtaagcagagagtccggtctccaggtggaggccaggtctggcaggcctgcgatgcctttgctgggtctacaatgagggcctcaggggagaggactgttctctgatttttcccagtggccacggccacctcaccacaagccagcagtgaggggcaggggaggctccatctgggggcagcccagagggcaagagagctgagccctgatacagtgcagcctttctggctgtgaggacgactgagaagtgggactggcctgtgggaacagagaggttccagcaggaagagcagagacagcagttaacatgcatcgagcacctgccggctgctggccctgggcgccgcattgtgttgatggtcacatcggctgcacacggtgactctgcgaggtgttgtgtccatttctcagagtgtggagccaagcctcagagaggttcagccacttgctcagggccacatagtcagtggcagagccaggatttgtacccagatggtctgggcccagagcccctgctcttcaccactgcctgcctcctgagaaaccttaggcttgccctcggacagaaaccttgacagttcatcccctctctcctgcctccatgaacactggtcctcactgcgatccccgccctgcttgagctggggagttcagagtccggttgcagcagtatcacttggggtggtgaatgggtgactctgaagtctgagcctgactcacagtctggggcttgggggtcctggggaacctggcttgggctcttggcgggaggtgcgcttataggcagggcccctagggctgtggattcctgcctgcctgcccgtccgccacctgccagctgggccaggcctgtggtttcctctgagtggttttcttggcctcgctggcccccacccaggctgagcctcggccacacagcatgttgatgagggatgagtcaccaccgtggggggagggaaggaaatgaagtccagccacagcagagatccagggcctggatccagctggggaaaccgaggccaagatggggaaggtccctcatcagagacagtaacagctggaactagaacccaggactcctgactcccagtgcatgcctcagtttccccctctgtaatatgaagttgataacctcggctcttttctcctctgccactcctagggccattgtgacagttgagagacgggatggggtgctcatgcaccatattttacaggtgaaaaaacaggttcagagagggaaagtgacttggccaaggctacacagcaaattaacatgtcctgtgcaagaagcccattcagaacccagccccaccccttcccaggagcacaccttagaaagctctttatggttcatcaggtgcttcctctgggcctccccttgtccccagaggcagagagtatagattcaataatgtggaagggggaatgtgggttcagagagaccttgttcccactgagggccacggagcacactcagggcaaagctgcagccactgcccctgtggacagctgggtctgcctctctgcaggcttaggccccagccccattgctttcaagaatgctcccatccctggcagctacaagaaagaaagatttttcacgctaggagctgccctgatggagggcgggagaccatagctggtttgggactgccaagctggaccaggactgagcaagggttcccagggcatcagttctctgggtgtcaggctgagcttccctgtcccttgcatggtttgctgtgcccaccacaggcaccagggccatgggcccctcctgctcagtgtccatctcaacgctgatgctgtgttcttcccctgcaaggcacctctgtgcctgggcttcccctgaacggggtcctgggccctctttgtaagctaagaagggttaattaacactgtcaatgggagtgctcctcccagttggtcccagcccagagagctttcctccaagaccatttcctgcctcaaggccttagccaggcccacagtgaccaccccccacaggtctggaagccactaagcccacatctggtttggattacatcagggctggtgacactgcctttccctttctgggtccagtggccttgtattccactggccaccttggacccaataagacagtggtaggtaaagattcagccagtgatagggctgcgccgagggcatggaggagccagggctgtcctgaaggatgtgcccacctggaccatctcctacctatgaagctgcctacgcatctgtttcttccttcatgttaatgggtaatatttattggccaccaggcactataccaagtgattcccatcaattaacttattttgtccccaccctatgagtaggtattttcattatcaacatttcacagatgaggaaactgaggcacaaggagtgtatggacaagtccatgggctcccagctgatgaataggggaatcaggatgtgaggcaggccatctgacttcccacacagcaaccacttcacaaccatttgttgagcccagctctgggcctggcccccagcgagagcctggggatgaatgagtcatggcccttgcccttggggagctcacagcctctggaaccccagtgggaggatggggatcagggtgaagctggaaggaatctcatgaaaccatgagaacaggaaggagacactaacccctattctcttctcttcagtgggagtcacatccaagctgagggcacacaaggagcagggcttttccagacagagagtgaggagggtgttccaggcagaggggactgcttgctgtccagagacttgcagctgagtataagctcatcttggagcaggccagtagggcttttgcatgagacgaagcaggaaataggtctggagaagttagcaggagcccgaatggcaggctgacatgggacaatggggagctgtggaagggaggtcagagatccatgcttacaaaggatccctgcagccagggaggtcagtgaatgggagagagaggctggaggcagggacacccggtggaggctgagccatgtctgcttgagaggctgttagctgtggggaggagatgggggagatgcctctagacagataggctgatgacagagagattgggttccaggtcagacagaacagggttcgtacctacttatttgccctccctgagcctcagtttcctgtctgtaaaatggggtaagaatcgtacctgcttcccaggataatgagaaagttacatgggatttgtaggtggagcctggtacaggctactgagcttatgtttttttcacaactatttctccggccctggctatgttccagacactgccctaggtgctggagacaagcaatgaatagacaaaaattcctggcctggtgaagcttcatgccagtgggggagacacactgaatggcaataatgaatttagaatgtgttagtggtgggggaaatggggaatgtggtggccaggcagggcttttctgaggatatttgaacagaaactggaggatatgagggagtgaagcctgtggacattcacggaagataaggcagagccagtgtacaggctgcttggagtgagtgagggggaaggaaggaggagctggggccagaccacagtggcccttgcctattaacgaaacagggagccttgttggggaggtctttgagaatttttttttttttttgagacatagtcttgctccatcgcccaggctggagtgcagtggcgtaatctcagctcactgcaactctgcctcctgggttcaagcggttctcctgcttcagcctcccgagtagctgggattacaggcgcccgtcaccatgcccagctaattttttgtgtttttagtagagacggggtttcactatgttggccaggctggtctcgaactcctgacctcaggtaatccaccagccttggcctcccaaagtgctgggattataggcgtgagccaccgtgcccagccttgagatttaattcatggcaaatgaatgaatggtgaccatgactccatccatccactcctaaaccttcatggagggactactatgtgctagtcatcgagttagggaagatgacaaaacgcataaggcagacccaacccttggcccctgaagtttacattctaaggcagagacacaataaaacatgagtacatgtgcacatgcgtgattctacattgcagcagatgctatgtcagcaacataaatgggatgcagagggagaataatctgggggcatccaattagataaggaagtgcaggaagacttctcagagaaggtgatgtgatgtaggtggtggatgtagagaggcagccagtgggggcgaagggaacagctgctgcaaaggcctagagatggaaaagaaactcacggggaggcaagtgtcctaagggagtgggagggtcagccctctcttgtttgtatgctcagggcaacctcaaaactggccctgagggctgtggtcaagaggaggcagccctggcctttcccgggacaccaggctggcttctggctgacagtggcctgtttttagccatggaaccgtttccttctgccccaccagctgcctccctgagtcaccacctagtaccagaagtgtgggaacaagagattaggcacctctggacctgtgaagatgtgggttttgccctgtgtgaagggagagatggagaggactacgctgagggcatgaggtcctccaacggagttgttttattaattctaatttcattcctgttgactgaattgtacaggtagtgtgcaggacaaggctttccacataccagtcctggggactggaatcattgctcccattttacagatgaggaaactgagactcagagaggtgaatccacttgctcaaggtcacacagcaaggaagtgaagatgccaggaactgagtcaaaagccttgtctgtgtaacagtccttcctccccctaaatcctgtcctcctgcctccacagcagctagacactcttctggggcataaatcaggttaagggagacatgtccagtacccaaatacctatttattgtacttaacaaacacttattttattttatttttttttttgagacagagtctcactctgtcactcaggctggagtgcagtggcatgatctcaactcacagcaacctctgcctcccaggttcaagcgatcctcctgcctcagcctctcgagtagctgagactacaggcatgtgccaccacacccggctaatttttgtattttttgtagagacagggttttaccctattggccaggcttgtgttaaactcatgacctcaagtgatcctcctgccttggcctcccaaagtgctgggattacaggtgtgagccgccgcacccggccaacaaatactgatattgtagctgccatgtgccagaccctgttctaagcactttgccagtattaactcatgtaatcctcacaataacatcatgggggtaggtactgttagggtccacattttacagatggggggaacccagaaaggggaagcaacttgcccaaggtcacacagttaggacgtggcgcctggtccatgggtggatggaagtctgggtgtggaagggatgttttggctgaggcctggattcctggattgcatactctcccagcaggcggcatgccaggctggccgatacaacctcccggctttttctcatcactgtggcagccttgcagggccctgccctccaagggagagggtctccttcccctcggccaaggcactgtttggggtgtgggcaggagtgcctaactctgggccatggaatgccataaaccagggaaggaagggggtgggcagggagcaggctggagataaagcatcggggaggaggggctggctaaggccagccctgtgggtgggtgagggtggccttcccaggggccaggagtcctttcctctcttgggagaacaaaggccgaggcccagcaggtgaagcttcctaatggtctttcagagctaccacacttttgtgggaaggggccggccacctggaaaggcagtgggctcccagttcctggaaccccatgtgatgtcgaccattttaatgtagagaggattcagaaatcgggcaggagatgcccttccggctctgatattccaggaatctgagttgctatgattaaaaactctggaagtttctgaaatattcatttcagattctgattctgccattttaggatttgattcgtctaactctgtaagggtctcaataaccttttttgctctcacctgctaaagaggaggaatggggactgggattccctcctagagatggacacgctccctatgaggaggtccttggtccaacgagatggccccatccctcccctccagagctacattaaggcatcagagggggtgccatggatgggctgagaagcggctctgctcctgccttgccatgtgaccctgggcatgttacctctcttctctggccttggtctctccatctgtgccaaggggctctatctgggtcgacagaggcattcactgtccccgcaacccctgtccagatgagggtggtcaggtgggagccggaggtgaatgttggtcatggaaagaatgtgaaggcaggaggccccgtgggtggggtccctgggctgggcagctagccaagggtgcatgagatcatggtgtctccttgcccagcacctccagagaagggacctcctccaggtcagatccgttcctgggactcagaccgtgagtcaggctgcccttccccacaaccaccgggcaaagggagtgaaacgcagagaggtgggcactggtccaggctcatacagtgagtccaaggcatgtgctgagtccagggtcctgcttggggggttggggctgagggggcctgtcttctcttcatgactatgtcggaggccagagggagatgtgcagagggggctctgagcctgcatgtgggcaaccctttcgcacattcccccagggcaagggatgagcaggagactcagcctccttctccacaagtccccaccctagtgcagagctaaacttccttgattcagggggatgctggggagtacagcggcagaggcctgggctcccccagcccagccggcttcccatcctcctagtagctcagaacccaggctgggaagggactggggtcaccagggctccacaggaatgtgcaacgggaacagcgcccagcagaggcctccttccctgacccaactgagaaagaactctcacccctttgaatctgtctgtctgcctctgcagggtctgtctttctgcatctctctctttctctgtcatatacacacacgcagcctgagacacactgatccacacaggcacacgccatggtacagactcacacaagagcctccttccccctcctcaccatgccctgcacacagagggcctttcctcttccctctgccccatgaagctgcccataggaggctgcacagacccttgctcctcctccccattgtttgatgggttccaggctggggttcagcaggcatggtggggaggggccccacagctggccaggcgttttcccagcccctctcaccctgcaggtcctcctccaccccagctctgagactgtgggaaccagacagttcgggctgtccagccgggctcgcttcctcccaggccccaggggacctgtcgggggaggagggagcagcaaaggctggagtcctcggggctgcctgggcaagggagggcctctggaggggagagggctgcctgcccaagaaggggtctccagccccctgagtgtaacctcgtgggacataagacactctagaccacatgccaaaaaccagaatgggggtgccccagcatccctccctcctctccctatgcccatgatccagataggaggactgaggctctggggaggaagccattcgcctctgctcctccagtgctggggtctgtgaggacagcgatgtttcagattccttctctgttcctctaacgaggaccaagaatatccccatttctcctgcttcctcgcgaagggatagtcagagaaggtcaaaggtcagggctcagtcacttctgaatggtacctaggacagtcacagcccatgctgctggccccaagaaatgccgtcttaaagagtcaccagaggacctcatggagctgggggctcagggaagctcccacattaatgtgggaagtccaaacagggggtaggtgctgccttttgaaccctaggtgccctgtctgcacaatgggtaaagggtgcctttctagccctggccttccaggattgcagcaaagccctcccacctctgggggccaccaccagctctgccctgaccctcttctccacccttatgtcctcactcaagctgcaggtcagaggctggagggtagagccacacagatgtggttttgatttaccctctgccacccatttgccctctggagttggagctggcgagcctgtttccaccactgtaaacggggccaactttccaaatcacacaggtgagatgatacatacaagcccgggacaggatcagtgtcacaaattgtcagggttatgatgactgcacctacgggggctaagtcccagcatctgagactggagaatcagtccctcaggccagcccagtcttgcccctgcccagtctctcccttgcctgtatcctcctctccctgctccccattccctacctccccttcctctccctttctaggaaactccctgagaaagtccccagcaggagaaaacctcatgtgagatattcccaccaagggtctctgcccccgctgcacaaccccacagccacagccacccccacatacaagcaggcaccctggccctcagcccccagccatcaggcaagctgaccctcatcatcacatggctttattggccctgagagccacagagtaaatcccaagaggccctgcttcccctcacccccaagtttgtccggaggccccaggggcctggctgagcaccgcttcaatcctggctttctgtgtggttgtccttggctcaccagggctgggtccttcgagagttcttcaggtcctagagccaggctcagcccggagggtgagggacctgcagggactgcccgaggtgaggctgcctttactcaaagaagaacattcctggcgtccggtataggcagggggtcagccccaatgggtagccggagcctccctggacagggaagccacctgcaacccagggttccttgtggtcagttggcaggggcagtggggcccggagtgagcctggaggggtgggtggtgcaggggagggggctgctgaggccaagaggtgctcaaggcctgggtcagcccccatgcaaaaattcagtgcctgcagccgacactggtagctgctcccgatgcctgattccggggacaagacgggcgtaggggccttattaaaactctcagcctctgagaagccggcaggaaagccaaacgctgggcatgaggaagatgaggtggccacggggagctcccctgggcatgcaggcttgggcgtggaaatctctttgggctccatgggtggccgaggcctgccatcagtggttgctgggcacatactggctggcatggcccccaccagacccccaaagcttaggcccttgggatctggcagctctggtgggaatgagcactgcctgccggtcgtggcgttggggactcctgggtcctggctggtcgccctgaggggtccacggcgtgccttggcggggccccgggtgccctcagcacctgtctgccgggtgaagcggcggcggcggcgtaggaagctgccgtgctcaaacatgtcgtggcagtcagggtccagcgtccagtagctgcccttgcctggcttgcggtcatcgcggggcaccttgacaaagcactcgttgagtgacaggttgtggcggatgctgttctgccagccgggccggttgtggcggtagaaggcgaatcggcccatgatgtagcggtagatgccactgagggtggcccgctgccccggtgagctctggatggccatagcaataagggcgatgtagctgtagggaggcttggttggctcagttgtgggggcgccaggcccgggcagaggctgctgctgcatgctggccgggctgccaggctgctgggacctgctgggtcaggctcagcttccagggctggcgtccggaatagcctgcccaggctggttaaaaggtccactggcccagcctcccagcctggaaaggcaaaaaggggtgggtctgctgagccatcctcccctcctccctcgccccactcccacaaggcccaaaagaggcgggcaggagaggccagtagtgggaagccgagcagctgccagggatgaggagttgggaaggaagggactgagaccctcagcccacgtgtgctgggtggtggtggctggggagggacaggatgtgaaactgagcgggacagagacaaaaacaaaatgagacagaggcagaaacatatgaaacagagacagggaaaaaagagatagagacagagagaggtagagacatcacaagagggagaaagagggagagacaaagataagacagaggcagacacaacggacagagacacccagagcctctcagacactcacagagagacacacagacatacacgtacagacacacagagacacacagacatacacgtacagacacacagagacacacagacacagacacacacacagacacacacacacagacataagcacacacacacatatacacagagacagacacacacagacacataggcatacacacagacacacacacaagcacatacacagacacacagagacatacacacacagaaacacagagacacagacacagacacacacacacacacacacacacacacacgtagtatacggagaaagtgagaatcactgagcaggcagaaacaaggaaatccacaaagccagagagaaaggagatactgagagacacaggtgcaaacacaaggagtgaaaggaatgaatagagagagagagagagagagagagagagagagaggagagagaggcagggcctgagcccagtccccctagagtgagagaagccccaggggcttctctaatccctacctctactcctgcttttccctcttctcccaggcctgtggtctactgccttctcctgcggtgcagaggccttggggccacaccactcctaccccatcctcctagctctggggtgtctgcagggaggggcacctaggatggtaaggagagcccatgaaattcagttctgctgcatccctgtcgccccctagtgactggtgtgggaaggacagctatctggggagagacattctccctcccaagaggcacctcaagaccttggctgagcctcagtttccccatctctaacatggagctggtgactcctcagctgtccaggccatggtggggaggcaacaggttccccttacacagaatgcagcaccctcatcaagagcctagtatggagtagggatatgaacatggctgcggattgtcactctgaactgaggctaccccagctgcagcctggggtcgggaggtccagagagtcaggcccagaacagtcaggccttctggaggaggggacggcatcctctctgctctcccactcccaagtcactgctcacccactctgtaccaggccagctcacctccccaaccctacacttacttcttcaaccaaccctgctctggagggcttcattgcttcttttgaatagatgagggctctgaggctcagagaaggtaagtaaattccctgatgtcccacatctagtgagtgacaaagctggatatgagcctaggattctgtaattcctaaatactgcctcttcagtgaggggcaggggtagcggagagtcgctgggtccccactagaaaacagaatgtgaactccaagagagtaaagagcatgctgttttgctgtacccccagagtcacacactggacactggaacagaggcctggaacagagtaggtgttcaagaaatgtctgctaaatgactaaacaaacagcaattgattgatttctgtcctttatcgaatcacagttttccccccatgaaggtggcttattaatgtatcattaaaagagacttacaatattggcatctgtaagaggattcctataaataaaatcagaactcagaaaagaataaaaggcctgatatgtggggtggaaaacagctactttattcccatggcagggtaaccaactttctggttgtagtccccctttccagttctcagattgcctacaacgtacagcttgcaaagaccagtggggcttggagaagggctggtcttccacgttgacctctgccttagggctgcatttggaggtccgcctcagtttcttcaaagacagcatcctacaggtgctggtacttcagtggttagcatccaaagcccagggttcggccaagttccctgttttgggatccttcccagcccccagaataaagaagagagactagctgcagggaggaggaaggttctgtaaattctaggcccctgagaggctaggcagttttgttatggcttgatcccacactaaacaaccctgatgatctaattattggtaaaaactttaagcaaacgttttaatggactcaacagcaggttaaggctggctctgaggaaagcgctattgacaaattgggctgtcagcaagagatgaagtcttgcttctgctccagttgctgcctttctggggcctcaagatcaagttcagtttcctgccgaagccccatgcccagctggggggcggtgtggcctactctcgagttccggggccccgtgacagaggagtggaaggccgcgatccacctctgccgtccggcagacctgggtgatgtgccgggggaggccccaagtctatgggcttagtgtgggcagggttgggtgggagtagggagcccccctgttgggggctgccttcagcgggtacaagaagaggaagcggctcgcttaggatggaggcagctgcattgaaggtgagtgatgccatcggggttgccaggggttgaggacccatctgggcgctcggttgaggcacttagagtgcaggacgagctcccaggccgaagctgcacctgcacctgcgggggcgggtggggcgatgagcagaccctctccatttcccgcctcggatgttcccatgggaagtcacagccctagttacagccccatccctacccccattttccaggtagggtcctacagacccgagggtgctagaagtgtcagaggcagagctgggactggagggagtgtgggaagggctgtctggaggggactggagggcgtgcttcttggctggagtggaaggagtgactcacgtccgccatgatgagctgctccttggggtgctgtgtggggcccgggtcctcctcaccgaagcacagacagatctggtactttgggtccggtgaccatcctgcaggtgggcacacaattatacgacactgagactatagggactgggcaagaactaggcaacccactggtgcccatcttgtgctcatttcccatgcccaagtcctgtaagcccacatcccattgtgtgcctgtaccctaggcccacttccacgttcctatgcctgtcccatgtcccacatctgtgcccacttccaggtcttatgtctcttccttggcccctatgcccaccccatgcctttatgcccaacccatgcccactgccactcacctatacctatctcgtgcttggtgcacctcacatccaccttatgccctaagccaacacatgtaccgaagccctattcttatgctgcacacccaacgcctcaagccttctccatgccagcaccccatatacgcctgtatccgtatatgtgcccccagccctcctggtgcctgtattctttcccatccctggtgcttttgtgccatattctttgtgtcaatgtccacttcatgcccagcacccttaggcccatccccctgggcctgcatttaatgtgcccactctcctctgttcatgttcctttgcccaccgcgtccttatgcccccgttcccacgccactctgttccactcctccagccgtcctaccgcctggaggaagccgcgtgtgttcagcaggtggcaggtgcgcctgcgctccaccttgttgggctgcgccagtacaggccctggcacaggcgcttggtgaacacgccctccggagccacccagagctgcacaccgcgctccaggtgaggcggcaggccctgcaacacgtgggcgctgggcaatgggtcggggaagcgaacctgctgcaacgtgaggtggcggccccagcaggcgctcggcggccgcccgcggactcagacgacagcgctgggctgtgcgcccggtggcttcgcgcaccagcgctgcggagagaagagccacacgtgcagccagcaggctgtggggcgagagagggtgcacgggctggacgtgggcggcgctagctcccctcgccttcttaccctccccttcaaactctgccggacccagaggtcgtcccagcctctacctcggaaattttgggtgctctctccctatcagtgatgataagaattctagtaataatagtagtaaacaatagcttccagtataaacgaactgatagtcgagctctgcggttaaaagctggggccatctgtacagtgagggcatgaccctcccagcaaatcttctgggattctaggagcttcctcccagcaaagattttgatgcaggtagaaataaccataacagcgacaataacaacaacctagcagcgtctcatgagaaaccagcaatcctgctcagtggttagggttgtgggctctgcagccaggccctcggattctagtctatcactgccacttaggagctttcccagggttaccagctgtgtgacctcaggcaaggttcttaacctctgtgtcctggtttgggcatatgtaaaatgggaataatagcagcatctgggggctgtggggagcttggaagggtgcctggcataaactaagccctcaggaaatgttgactgttgtggctattattgggagcctgggctgggtgctttgggtgggagagagaggtgggctggccccaccccgcggccgtccccagttcagcacactggtcggaggggaggggatttcgattccttaccaggttgctgaagtcatcggagggcattgggcaccagaggtttttgaggtcctatgtctggcaccctggtgaaggagaggaagcagtcaggcaccatctcaccctgaccccagacccatagataaggaggaggccagggaggaggcagggctgggtgaggagacccagtccttactgtggtcaaccaaagggcctggaggaggatgggtggtagtaaggaaccctgctgggccagcctgtggggccactccttgtcctcatcctctgtggcaaatccggagccatcctgagcattgggagaagaggctgtgagggtgggagaggaggcctgtgactcctcaggaattcccagactgttcccaccagtgcagagaggtctgggcggactgaaggccagctggggttgacagtgtttctgagtaaaagggctggctgtccaatgtattagaagtcaatattatggcactgggcttttgagaaaagaactttgaagtttcagagctcaaactcccccgcccccatggaggtaaagagaaagttgatgaagatgttgtaggtattagggccagagatgggtcactgtgatagggagagaagtgctgggggtaaatgcggaggtgagggagctggagatgaaaggtatgcgggacagagccagatgctgatgcgggggtgggggtgatgagcacagagcaatgagctgtcgacgatggcggaaaggtgatggggtggagataataggggtgatacagacagaatgagggagacagagctgatgggaacagtgagggagccggaggtgatggagctggacccgatggggtgcatgggggtggagtgatggacccaaggaggacaaaggaatgaatgtggagaagatggggtggctgcagacagggcaatgaaactgaagatggtggaggtgaagggaatggcctggtggtgctgcagatggagggagggctgcaggagaggtagaaaaaggtggagcgggtgggagcatggggacagggctggagctggtgctctggagggatgaggtaaatgatggtgctggaggtcatagccagagagggtggggccagtgggtgacttgctgagaggtgactgagctggcaaggctgcaggggctggaagaacacactcagcaggtctgacctgcaggcaggctcagccacttcccaggagcttccttcggactaaagggcatgcctacctcttcagggggcgcccaggccctggtaactgcatcaagcaagagacagcctgctattccctgggccccaggaggaaccccctcaatttagacgatcccagatgagtaccccagctcattgtatggcctcaggcaaggtccacctgtttcttggcctcagtttcctccttttctttctttcttttttttttttttttgagatggagttttgctcttgttgcccaggctggagtgcaatggtgcgatctcggctcactgcaacctccacctcctgggttcaagtgattctcccgcctcagcctcttgagtagcagggattacaggcacccgccaccactcctggctaattttttgtatttttagtagagatggagtttcactatgttggccaagctggcctcaaactcttgatctcaggtgatccacctgtctccgactcccaaactgctgggattacagttgtgagccactgcatccagccagtttcctccttttctagtggggagataaactgtgtggtctaggcgtcctaaattgaccagcacatgagtttaagctcaatgagtccaccacccactttatagatgagcaaagagatccttgttgccagacagccatcgttggccattacctccaggggcaggatggtacctgggccacagcggcagacacaatgtggtcttgtagaagttggagatgttggccgggcatggtggctcatgcctgtaatcccagcactttgggaggccaaggtgggtgcatcacctgaggtcaggagtttgagacccctggccaacatggtgaaaccctgtctctactaaaaatataaaataattagctgggcttggtggcaggcgcctgtaatcccagctacttgggaggctgaggcaggagaatcgcttgaacctgggtggcggaggttgcagtgagccgagatctcgccattgcactccagcctgggtgacaagagcgaaactccgtctcaaaagaaaaaaaagaacttggaggcgtccagctggctgcactcactcttgcagcccagaaggtggcgctcttgttgaaggcagagtggaatcgtttcttccaggtggaggggcctctttgttggtgccctccaaatgcttgcccttgtgcaccatccaggcctggaggattggggatgggggccttgggggggcatttggggaggaatagctagggcactgggccgtgcagagggatgagaatctgccctgccccttgccctctctctccctccttttccctttcctttccctccctccctccccacaacacatattatttgagctcctactaggaccccagctagggctggggattgaatgaggaataagatagacatggttcctgctctcaagcctaatgggagaagacagctgtaatcagttaaacagaaataactatattccaaattatggtttgtgataaataaaagaaaaaataaatagagtgatgggatataaaatcatggcagtggtttgctatctgccgagccatagaatgaaatccctacctattgtcatacacaaagtggactccagatgattttaaaaaccacaggtaagagaaaaaatgataaaaaattaatggacaataatgtaggagaaaatcttttagggtcagagaacatttcttaaaatgtaaaaggagtgagaccctgtctctactaaaaaaaataaaaaataaaaattagccaggtgtggtagtacatgcctgtagtcctagctacttgggagagtgaggcaggaggatcacatgagcccaggaggtcgaggctgcagtaagccgtgatcacaccacttcactccagcctggtgatcagggctcactgcaacctcgacctcctgggttcgagtgatcctcccacctcatccaagtagctgggactacaggcgcaccccaccatgtctggctaatagtaaaatattttttgtagagatgggggtgtcactatgttgcccaggtggttggtctcgaactcttgggctcaagtgatcctcccacctcggcctcccaaagcactgggattacaggtgtgagttaccgtgcccagcctgggaggctactttaaagagtgtggtcagaaaaggcctctttcaggaggtaacatttgtgctaaaacctggatggagcctgatgaacagctggggaaaggtgttccagtaaaaggaacagcaaaggcaaagggcctgcagtgaaaaagagatggataattcaggcaaggccagtgtggtcaaagaggaggccatcaggagatgtattgctacatttctctcgttcagcactgagggggatttaactgatgaattgcactcaatcatgcactgagggggatttaactgatgaattgcactcaatcattgttctcagagactccaggtcttgttggaaacatggacaccaaaacagaaaagccacagttccttgtgggtgccaggagtgagactttttgaggcttgattttattgtctgcaaatgtctgtaggtgtcaataccacctaacctcgtgaggttggggtgggtataagatgagctggtgcatgtaaaatgcttagataagtgcctggcacacagtggtaatttattgtgacacttattgtattaagaataacatgaagatgacgtgggcacagggcagagggtgctatcaccatgactagaggtgtattggttttgttcatggctgtggtctccaagcgactagaatggtccctggcacacaggacacccccagtatgtatttgttgaatgcactgagctgggccttgaagggtcagtaggaagttgagagatggagtgacatttttggaagagggaagagcttgagcaaagtcctggaggtatagaagggcgtggtgcactcaggggtcagtgagcagcctggtgttgcccttgctgggtgtgtgtgtctgagggtacagtcaactctcgttatttgagggagtttagttatgttctataaagttcccataaacactaaattagggactaaggaaccattgctcctaggggaaatacagggctaggtccctgccagcttctggtcataccattttcatcaaccaaccaacacataaccttgttttctgtgtgtttctgtttgaggaactttatttaatatgatgttgatttattaacactgaactcgcaaccaacagctctaaacctcatgcctgaacgaagcttatctaacttgtattttccccagaaggcatatgacagctttcttgcactcaggaacactagaccacacttcagctttatgcttgggggccattttcaatcaccaacaaaaaagcacaaaaacataaaaaatgtggcactaaacagactgtaaaaaggacacgtgtttacatatgagagctgaaataagaaggcagagaattgccttgtttgacctgagcttcgaatgttcctgggtggttggggggcaacttaccttttttgccattctgcgcacatccatgaatggccatgaaactgatacaagtgttgctttggggattacaaataaatcatagcaaataggataatttgcaacgacaggatctatgaataatgagggtcgactgtgtgtggtgggggaaagagcaagagaaattaaggaggaagagataagctgaagctagatcatgaatgtccttgaaggccaagctttattccatgagctttgggcaccagaagggtttgaagccaaggagtcacatgtgtgtgacagtggtggattgagggatgggtcagagcagccaaaaggatggggaggccagcccccagaatctcttgcctctgaacaacaatgctgttgttcacgtatatgcatacgtcttaagggacaggccatgcaaccacccattcaacacttattgagcacctactatgtgccaggcacagtgcttgatgacaccaccctcaagcggctcatggtctgctggagaagacaaactcacaccagacacttaaaattcacagggaaagttgttcaatgagccttcacctttggagtcagtgatgacttggaagaagcactgagttggagcttaataaatgcattaaataaatgaatgcatcgggggaggctctctcttttttaaaaaaaaatttttatttccataggttttggggaacaggtggtatttggttacatgagtaagttctttagtggtgatttgtgaggttttggtgcacccatcacccaaacagtatacactgaacccaatttgtagtcttttattcctcacctcccagggaaggctctcttgagcaagagatggttaagctgaggatggtgggagctgaccaggtaaaagtgaagagcagaaggcattgcaggcaaagggaatcgcatgtgcaaaggtttaacggtgataaagacatgaaacatttagaaatgaaaggagctacagttggggaggggagggagtggagacagatgaggccagggaggggcagttcatggatggctttgagggtatagtgagtgaggaattgagactccttcacaatggcaatggggagctatggaatgattctgataggggagggtcgaggctagatttgcatttagaaagatccctcttaaggactgcggggattgctgagggatgggggaagcaggaagcccagggaggtcactgcagttgtcctgtgagagctgacagaaatgggtttcagcagagggaccgaagagacattctgcagggagagccagcaggccttggtaatggagtagaatgaagctggaaggtggggagtggccagggttcagatacccaggtggcagaagtttgtggggcagagctgatgagtgtgatgtttggggtgtgttgagtttgaggtgctcgggggccatccaggagacagtagccagcaggcagcttgatgagcaggcttggggttcagaggaagacccacagccaccatgctgaggccacggaaggggacagtgggacatgaggaagtaggttcagaagtgagtgctgggagccccagtagaggaggggacaggatggaggttgagaaacaaaggcctgggaggggttgcagggcaggcagcagagattctggaagccagatgggagtgtttcaaggaggagggagggcctacaagatgcagaccaacccaacaccatccaggagccaaagaagatgaagacagtgacatatgcttagatttggcaactagaggcattatcaagagggacagaagccggactggtcatggggggctgggaggctgagagggagggagttggtgtaaggagactctccaggtgcttcccactgtggaaggagggggaggccacagaaggaggggctggaggtgactttggtgtttggggtggtagtgtgtggatgtgcggttggttgcttattgctcagggaagagagcccagaattgaaatgacggcaactgtccctccacaatgccaggaggtcctccagggggatctttctaaatgcaaatctggtctttttttttttttctttttatagagacgggctctcactatgttgcccagactggtctcgaactcctgggctcaagtgatcctcctgccttgacctcccaaagtggtaggattacagttgaggcacaactcctggccacaaatctggttttgaccctcccctaccatagctccccattgcccttgtgaaagagttccaactcttcatgatggcctcaaagccatgcatgaactgcccctcctgggcctcatctgcctccactccctctcctcccccactttagttcttttcatctctaaatgcttcatgtctttatctccattagacctttgcacattcagttccctttgcctgcaataccttcgcctcttcacctttacctggcatgctcccaccatcctcagcttaaccatctctttctcaagaaaggagccagtttggaagaagttaatgatgactggggaaaggagggacattcctgcaggaggtccctgagaagggctggtgttgggagcaccaaaaagtttcctgagctgcagaggttgatgggtttaggggtgggaggctgacagaattcccattagtgcattggtggagtgggagaagaggccctctgagaggggccggtggtgcaggtcgtggcagccttggctgattgttttaagaaagtgtctgagagtccctcatatgtagagaacattaccctcagccctagaggccagaaagtggcccagggtcacaaggctatccgtcagtctcagtgctggggcaacttgtgtccagagcctgcccagtgctgagcgtctccagtcccctgtccccttgccctgaagagtgctgagtcctgttgcacctggtagccctgcttggctacatgcttccaggggatgcgaaagagggtcttgcccgcatcctcccagcataaccccacgtagcacccactctcaatctgtgcccccccagtcccagaggcacagggaacctctggctctgccatgggtcacctgccgtcggggacctttccttccttctggccatcagggatgcaggggccaggtcttgggcttgcagtggctcaacccacgtgggcctggggactacgggccacctggatgatgctgggaggctatgaaagtgaaagtctgggcaggcaggtctcactttctgttttgtcccctctcttgggaggccctttccttttgcacctccccatagcagcctagcctggagggcattgatcctcttttatggggtggcaggaggcgctgtgagacacaagacccacgcaagtggggtagcctgggctctgcgggtctcaggaggccggcccccatgagcatccagagacacagctttgccccagtctgcaactgtcacctgctcttcccagcccacctggaaatttgtcagtctcttttcaggacctggactgttgagattggaaaggcacagggattctcaaactaactcctgccagaactgagaggcagcaactcgtttcaaatgcatactcatgacctccatcccagatctgcagaatcagactttctgggcaggaagcccaggaaacccacattgtaatgagttcccccgtgaggttctgatgcaggtagtccaggggtcacacttatttctgtaaatattaggagttcccacttaccgactgctcatcagtgctgggcctggctaaacactttcctgcagtgtctcaattggttctcacaacagcttatgaggttggtaaaagccctgttttaatgttaagactgagctcagagaggttaaagccctctaacaaggtcacagagctagtgggtggtggagccaggagccaaaatgtgtctctctgctccctagagcccgggagcctaagcagtgccccacactgcctgccgacagctacacctgtactttgtggattcttggtgggggtctctgaccccctaaaagtgaatgtaaatttcatgtctatgcatttttttgggggggggggatttgcatctttcattaaattgtcaaaggagatgtgggatatgaaaaagatcaagttgctcagattgctccactccttgctgtattcatggaactgaggctctgagagagaatgccccccactccctgcacctttgcacagcactggcacaaagctgggcacccagccagcattgaccagagactggaagcattgttcctgatgtgtacctgctgggagggctttcttcctgctcctcctttcctctagctcccatattccagtagccacctggctcttgaagcatcttgaaggattgatctggaatatcagatcagtcctatagatgatgggggccatggaggctttttttatttttcttttttcaaacagggtctcgctctgtcacccaggctggagtgcagtagcgcaatcttggctcactacagcctccgcctccatggaggcttttaaataggggaagacaccatcagaggtagaaggtgttttaaatggggcgtctggcagcaccattaaccagcctggaggactgcgggctccctgcactctggtgagtccagccactttgctcttcacatgaactgtgaagggaaagaccctaactcatgatggtaggtagttaggaagcagctccttctgtttttggaggttactggcaaggaggttactaactcatggccttaatgttctgtctgcctggaatgcttcccccagataaccaaacggtccactccctcaccacctgacatattttttatttgctgtcttcccgaccagaatgtcagcaacatgaaggcagaggttttgctcattgctgtatacccagggccgagcacaatggctggcacacagtaggtactcaatggacatttgttgaatgaatgaggagtaggaagttggggtggcagctgaaggttattttgtccatcctccaactccagtgctggaatcggtgcctccccgacagccctgagcacagtgatttgtgcatattaagaaccccatacgagtggcttattgggttatagctattttcgatccctctcaactttgggttaactttagttttggaagtatcagctgcagtgacttctactcatcctcagagccagctaccgctttgatgggcagccctggcctttaaagtcttggcaggaagggtcattcccactagctgggggtggagcctccttgtcaggaacctcccaaaccagaggagctgcttcctaactacctaccgtcatgggactcagactgactaagctagcgtccagctttccctgctctggctgtgtgtgctccggcaagctgcctgatctctctgagcctctgtttcctccctgaggattaagtgaactcatgcagtaaaaggtcaggatgagggaggcgctacctcaccttcctagctactatttgtgcacagggaagggaagggagtcggggaggggaggggcccctcatggtggaggagaggggttcaaaaggtggaagggggttccgagagaaggagggacttgggccttgtcaggcgggacaccgtggctttgggggaggggagatgttagagaaggaggtggggtcccaggaggcaactccgcagactgcagttgcgggagggtggtgggctcctcaggcccccaggggatgcaggctccctcgcatccccttttctgcaggctgctggcccctggcagtcctgctggctcctggcagaatcctgctgccccgcctttgttgaatgactgggaggcactcggacaggcagcttcttctgtgtctctttaataccctccaggcccgtcaaaccctccactctccctccctcccctcccgccgcctttaagggtgggccccctcccccagcccaaggactaaggcaccaggtggctgcagcaggccggcccggacacagagacgcacaggttggggacgctgactgcagacgcggacgagcagggcgggcgcgggaggcagggttcaggccgccgcggggctcccccagcctctgggcccgtcctggggggcgtggaaggcgcagacagcccccgaagggagccagtcggaagtggggagccacggctggactgcatcctcacttgccgcccttgcgggacagacaccgggggaggcaagagaaagtctgcttgacgcgcgccagcagcggcagcggccggtgggcttcccggggcgtgcgcggcaccaggcgctgcacggttccctcggaggctgctgagtgcggcccggcggaggaggccgaggtcgcggagccctgccggcagcgcttgcacagcggcagcagcgcgcgcaactcctcctcgtcgcggaaggggctctcgccgaagcgctcctccagctgccggcgaagctggggtgggcgggtgaggtgggcggggtcaaggccggcgcggggcggggtcaaggcagccggccccgcccccaccctcccgaccttcgcccttctccgagcgtcccacacctcgctgagcccctcccttcctgagcgtcttctttgcctcccttctccggggtttccatcccctcactgagtccctcttcccttctaggaggcccctccctctccctgacccctcttccccctttgacacgccagcttccagacctgctaaagtgacccccaggcgcccagcggggatcactcctcccgctttgcacttctgggtaactcctcccactttgcacctctgtgctcacaaccccattcccacagatttcttccttgcccgactctttcccaacgccgtgctgcagatgagcctctgggtaccgccctcaacctgctgagagccctccccctctcatcctttgttcccagggaggcttagttcctgacatttctacgtagcatctgcccgagaggtataagagggaaactgctgtggtctcatcaaggacacagggatggagtaggacatggacaattctccccgatggggtcaaacactcaaatccttcaggttccagccaggtagggcaggcagtggggagggctggaagacctggtcaaatggaagggcccgcactgatctaaaggcattcaaattctaaattgaaaaagaaaacacctggctgtctaacaaaatacacctaggaggtggattagctcaaaggccatgagtttgagaccctagaaaaatccgggtctgaggcacaggctaaaaatgttccaatcagtgatcagttcgagtgggaagaaggatctcccacccctggcccaacccagcccttgaccccatccctaccttctgggaactggcccagccaaactcttcaagctgctgcctaaagcctgggttggggttggcgatgggcctggtggccttgatggcttcaagcacgtcccgccagcctagccccgtcacagtcatcacatacgctgtcacaatcgtggtgctgcgagagatgcctgcaaagctgggatccccaacaacccctcaggcttcaagtaagatccaatgtcctccatgcccccaggcaccccaccctgcttcaactcccccacccttgcctcctgagctccaaccataagggacctgtcaggacttgccatcccacctccaggcctttgccatgctgttccctctgtctagagcatcccctgggttctcccacatcaaaagcctgagtgaaacaccattcattcagtcaataaatatgtcctgagcatctgttctttttcaggcactggggatgtagcgggtataaaacaggcatggtctttgctgtcctggagcttacagtatggctgggggggggggacagacgttgatcagataatcaattccaggtggtgataatagctttgaggatgagtctgggggctaggagatccacataggaagaggtattaatctataggtggggtggggttagggaaggggttcccaaggaatagatatcaatgaaatttgaaagatgaataagggttagtcaggaaccttctgggcagtgtgtacaaagaccatgaggcataagcctcgtagatttggaggatggggaggaggttagtacagctggaaaggggaaggagggagagggtgggaaatgaggcttgggaaaccggcctccttgctgggcctccagcagagccagcttgagcctggataggatgggccttcagtgagaagttaaggaatgaatgacatcaactgagcgaggggcacctgggaagacccagaattcctgtctcccagctcggggttccccactgccctgcaccatcacctccaaggcctggaggggaggagggaggcccagaactactggagggtgatgagctacctccatgacctcacctatccctcccaacagtcccatcaggtcagctttcttttccgcattttacagatgaggacattgagtctcagagagaaacagctacttggctatggccacacagctcataaggaatagagtcccgggttggcctctctccagtgaatggtgggccctcaggcactgtgacaggctggagaagatccctcacaggtccaaccttcccacagggggagtgtgtgttcagcagagggcacagccacttccttcctcccccaccttatccccctccgcttaactcaccagtgcacaaggcagttccccccattaaggcggcagcagtggatgaagttgatacattctttgaagtgctttttgctagaggagaaagcaatagggtagggagcactgcagggcagacctctcaggagttgttccgcccccaccccaattacaggatagcaagggacatagagccctggggtccccaggtcagccagcacatgcagtgaatatgggccagtacttagtatgagctggaggtgtgtttgtgtgaagcaagaatggtggcatttcaggcagtgagagagaccagtcaggacaaatctcaccatctaggcaggagcactcctcctgtggaccctgttttcatgttgggtttattgtggcctttcagagaaatgggtgggaggaaacacaggggtcccactcctctggggtctgcaatcagagcacctgggcacaatgatgggcagcagcaggctgggagcaagattcccaaggggcagcactgtctgcttggctccatcccaagcggggaggcactactgctgatgccacaaacaaaaatcccgttttctgagctcagttatactccaggccctatcctagatccttgacctgtgtcatctgatcttcgaaagcctccttgactctgatcatgcactcctgatttacaggtgaggcccagagcggggaagtgatttgttcaaggtcacacagcaagtaaatggcagagcctggccggaactcagatgtcttaaccccaaggccaggaacaggctgaatatgaccctttcaaatcagctggtgtagctggtcccaaggtacagagtgtccttttcccatttcatagctgatgagactgaggctcggggaggtggagagtcttggccaagggcctatcacaagggcatggttgagacagagtcaaacctgggactggttgagttgaacacctgtgatagctctctggcctgagtactttgtcctccttcaaaccccctccccctcccccaccacagaaggcagctgtctgtccatctatgggtccatccaggggaacttacatgggtacctcaggggtatcagcgaccgggatgcgaaggtaggtgatatcctgcaagtacaaaatacactcaggcaggggaccttgcctgcaaccctccctgatgctggtccgagctgcccaggcagggcataaccccagcccagttcctgcccttctctggcccactgtggtcctctctgtccaaagaaagtagttgtcatctctgaggcctcccagctgtgaccacttgtgattcctgaaccttctaagcacatggtgtctcctaaccccatcagcggcgtgggcatgacgtcacctatccctcccaacagggacccaggaacctttatcaagtagctaggaaagggctacttaaagggactccactccaaatgggaattacaaaattacatcgtaaaaaaggtagagcagatttgattatcttgaaaagaaacaaaaatcatgaaaacaagtatacatttcaggaatcatggttataaaatgatgtgctgattatgagaataatcaaggaataaattgtcaggaattttttccagcaaacttgctgtgatgtcctttgtttcctgattagccacacaatatcatgaagattatttttgcccgcctcctgaggacctccttgcttttctcgagaaactgtcttaacatttttatattcaaatggctcttttcaggggccaggcccgtcactggcagtaactaagggaccaccagccaggttctcatttgtccatggctttgtgtgagattccagcccttctctcactcacattccccaaggtcatgacatcctgcatctttggcaaggtttgcaatttcactttgcaacacatttggccttgggtttgtgtggtactatcaaaccctgcctggtaaatttgctgatggaggggggaaggagagatgcttgggagaagcaggaagggccgtaggagcagagactcattgtgtaggctgtcatttcattagtaaatacactcatgacttgacaaccttccccatgcactctagtgactgtttactccaaatactcccaaacgaggctgccctatgaggcaaaataagactgcaatggcctggaaatttcttctctgaatgacattgaaaatcatagattattagaggttgctgttagagaatatcaaatctgacatatgggaaaactgaggcctagagaagggaaggaccttggccaagatcacacagcaagtctatggcagaaccgggtcttcatttcagatctccaggaccttttcccacccatggttctttctctccagtggatgatacagactctaatagataagggtgaagaggctctgtttatgggataagaatatgattaaatttgttatagtatcagttgtgatttgttgagcatctatttatgtggttcccaaccactcagtgaagtgggtactgttataaagttcccgttttacagatcaggcaactgaggctcagagggggcaaagtcctgtccccaaggtcatagagcaaataaacagtgaagatgttcctgacataagcacgtgtagtctggatttattactttcctctgctgggtcctaacaccctcatgcccctttcccaggacttgataataccagcaccaaccgccctagaggggaccatgctttacagtgtgcaaagcatcttcaccatcctgcagtccctttgcatcctcacagcagccttctgggggcagacagagctgagggatcaaagccctagagaggtgaagtcacagcccaaggttgcatagcaagatacagagcccacagtcatccatttggattcatccatccagttgggtcatgggaagcccatatgggggccattttaaggttcagtgtgagacttctggtgctagatggcctgtgttcataccccaactcctcagcttcctggatgtgtgacctcaggtgagttaattgacctctctgggcctcaactgccaaatagggatgataatgtaaaatggcccagtggtggagaccaaatgagttaacatgagtcaagaaggaagcatagcacctagcacatagtagatatttgataaacaggtctgcaccctcccacccccgcatagccctgggatgggggtaagaagtacctgcagcagaggctggggtgactcatggatagagatgatgtgtgtgatcttatttcggcccagctgatccaggtctttggcatctgaaagaaacaggatgcttgagccaatctggctggcgggatgtcctgatggccaagtgcggagggagctcactgcctgcccagctctccctctcaccccaccactccaccttggcccacgctctgccggctccctgatcctcttgcttctggggcacatgcaagtaacagtacagcatatccccatccttgctcattctgttctttccatccaaaacacccttcccaggcatattctttgacccagcaattctgcttctaggaatcttgtctacagaagcgcttgctcacacagaaagctgtgtgtggaggatgatgttctctgcagtcctgcttatatcacaaatagtttaaacatgggaacaacctggtgttcattaaaaagggactggatgattaatggtgtaggcatactttggcacagtgtgccgccattaaaaagagttctatatgctgatgtgcaatgatgcccacaatgtttttttttttttttttttttttttttttttgagacggagtcttgctctctctcccaggctggagtccagtggcgcgatctcggctgaccacaagctctgcctcccgggttcacgccattctcctgcctcagcctccggagtagctgggactacaggctcccgccaccacacccggctaatttttttgcatttttagtagagacggggtttcaccgtgttagccaggatggtctcgatctcctgacctcgtgatccgcccgccttggcctcccaaagtgctgggattacaggcgtgagccatcgtgcccggctgatgcccacaatgtatttttaaggatacagaataagcttccacttttgttttaaatactatgtccttatctacaaagatatatgaacaaggatgtacccaacagtggccctctctaggggctgcatacccagcatatgcagatcttttatattcagaatgaataacacatgtcccctctatctccacttcctcattcgatgagcatttaccgagtgctaaccatgtgtatactttggctgggcactggaggtctggggccagcttcgtggctcctgcccttatggggcctgcacacttacagagggttcagaccttacttggccaaatactcacagaaatcaaggtggcatgagcggctgagggagctcccaggaaggaagggaccaggatttacaagggtgaagcacctgagcccctccctctctaaagctttttctgactctgcagatggaaatgattttcccactttgagtcacccaagccctggatcagtctgccccttagcatgttttcttttcttttttctttctctttttttttttttttttttttgagacagagtctcgctctgttgcccagactggagtgcagtggcacgatctcggctgactgcaacccccgcctcccgggttcaagtgattctcctgcctcagcctcccaagtagctgggattacaggcgcctgccatcgtgcctggctgatttttgtatttttagtagagacggggtttcactatgttggccaggctggtctcgaactcctgacctcaggtggtctgcccgcctccgcctcccaaagtgctgggattaaaggcgtgagccactgcgcccagcccccttagcatggtttctacccagcatgttttctacccaaggtctatgttcagctctgcctgcctgccaccagcctggaagcccctgaagaacaaggtatctatacatgggtgtcccctcctcctgactgaagattgtggaaggaatggatgagagagtggggaatgcaaagcttgccggctcaccgcccccccaacttccagctctaggctgcccagctgctccagggctctggggtgcgacagtgttggtgctcatgaccctgctcacaagaaggcccagcccatctccagggacctctcctctgacaaggaggaagttatggggggaagagttcccagcttccccgctagaagcagcacccgcaaacagacctcaacccagaacctcagggccagaagagtgctcagcagctggtggaccttttgtgctgaggaggaggctgaggcttagcgcaggtgtagacttgctcaggtccacagcccaggccccgagccctttgctctggccctttggtctggtggtagaacactggggaaggctgaatggcggggagggatgtcagtgtcaggcccccatgctccctccatgtcccttcaagcctggggacactcgcctgcatgtgcaccccttgtcctccatcagccttttccccctcccagcctggggccgcttccctgcccccaaccccattcctgagatgcatgggccagggcatgaatggtggacacaggcctgagacaggcagagtgccatggcctcgggacagagtgggcagtgctcaccaatgaagtttccgaggtagagtccaggaagtacctagaggaaggacaggcaagggtcagtggggcaggggctgcacccccttccacccccagggcagctggggggcccacagcccctctctgtcccatgaagggtatggacctcagggctcagggagcactctcttcccttttgtgggccctgagtcctctgtgagaggggtctggggctctggggagggtaggctagggggccagttaaccaaccgagggaaccaagggaggccagcttgggtatgagaggggagaggaggaaggcaggtcttaggaggagaggagaggagagaggtagacttgcagggtgcagggatggaaattctggggctggggaggcagaaaggcaatgacaggcagaggcgggacaggatggagaaacagccccggagagagccgaggagtcagcgacaagggagagggacacatgcagacggagagcaggactcactgggagacagcctgggagtgacagccacagcaagacagcgagagacacacagagtcacggagagagggcggacacagcggggacagagacgcagggtcagagagggggagacccgacagccgcggtctcgagtcacagggacacggagatgccgccgcacggagaccggcgagaacagaaggtcagaggcgggcggaccgagctggtcagcgccgggccgcggcggccggggcggggaccggggaggctgcgcggggcccgccccctaccttggtcatgccattgcccatgatcccgggggcggcggtccgggtgcacccccagctcgccgcccgggaagcgatccggtcacagctgccctgacggcccaggcccgacgcctgcagcctggcggggaacggggggcctggcgtccgcggccctgcccagccctgcccagccaccgccaccgcccgccgacccccggcccgggagggaaatggtggtggagccgccgctgccaccgccgccgccgcaggctcctcctaccccttcggtcatgtggggcccccgcctcgggtcgcggcggggggccggacaaagccccagtgtgccgggcccacggcccgcgggacaacggcagtttgttggggccgcgtggggccgccacctccggaggtgggggcgggggccttaccccaccctggcaccggcaggcgcgggcggatggggggatgtcgcctagagccccccggccggcccacaaactcccgtcccccttccggctctgcctggacgtccctgcgggccccgggggaaagcacccaacttctcccgcctcggcttctagcagaaacgtgacggggctggactttgatcgccgagggctctctgctcttcagagtctgcttggaacgggataagtgggtaattccttccgatacatcctctccacccgtgcagagacaccctaccaaccagccttcctcctttcccatccattctcccaccctcctgttcactcattcactcgtccatcttcccatccattcatccatcctctcactccttccttccatccatttcggcccctaggagggatggtgccatccagggaagctctgctgggaccaggcacaactgccattaggtgccccaagaaattacaggtgaatgttgggagaggggtttgagggagggttccagtctgaaggagactacatcaggatgtattaatagctagaggtcagggtcctggaaggggtctggagaccaaggtttgaggccctgttcacctctgacctgctagatgaccctgggaaagtccccgtgacccccagctaaccctatctgtgtttctgaggatgttgaggtgagcccttcctggcttctaggaccaaagctggagaatgtaaaataatcaagacacttcctataggactgaaatagaagcagctgcaccagctttgttccttcagccatcacccccacccctcaatctatagtagtaggtgactggggattgtggatagagagcaggacagagagaatccacagagccctttgaaatacagtgattggagaaaaataaaactgtttcttcctccctcaagttcatagcatacatggggctgcccgtctcagctctcataaaagcccagagttctcataaataccaaattattcagtaaatacttactgagcatctagtatatgatagagactagggacacagcagtgggtagagattgttcctaccttcattagctaatggtatagaccagcattgtccaaatgaaatataatgccagccacatgtgcagccacatttaaaaagtagaaacaagttaattgttgataatatttttatttaactcaatatatccaaaatatcatttcaacatatagtcagtattttaaaactataaatgagatattttatatcctttttaaattgtattaactattcaaaatctggtgtcttttacatttacagcacatctcaattcagacaagtcacattccaaatgcttactagccatatgcagctagtagctacatattagacatctcagatctaggagggaaggcaaacaagataggcaaacaaataaattatttacaaatggtcccagttttctatgaaggaaacaaagcagacagggagaacctctctgaataagtggcatttgagctgagaggtgatatataagaaggacccagctgtttaaagagtggaaagccaggcgcagtggctcatgcctgtaatcccaacacatggggatgctgaggtgggaggatcaattgagcccaggagtttgagaccagcttaagcaatatactaaaaccccatctctaaaataaatttggctgggtatgatggctcaggtctgtaatcccagaactttgggaggccaaggcaggaggactgtgtgagcccaggagtttgagaccagcctgggaaacatagggagaccctgcttttacaaaaaaaaaaaaaaaattagccgggacctgtagtccaagctactcaggaagctgaagtgggaggaccacttgagcccaggcggaggaggatcacttgagcccaggcggtggaggctgcagtgagccatgagcgcaccactgcactcaagcctgggtgacagagcgagaccttgtctcaaaaaaataaaaaataacacacacgaaaaagaaaaagagtggagagagtatttccagcagaaggaacagcatgggcaaaagccctatgatgggaatagcttggcctctgtaaaaagccagtgggactggagtagagggagctacaggaggtgttaagaggacggttcagggccggagcatgcaggagcacatatggccatgattgggagttaaagttttccttctcttctgtcggataaaaatccaacaggaaaatttaacctgggaggccaggtcatctgatttatttaagtcaaatacttcgacccctcactgaccctttcctttatgggggccactgcagcagctcaggtaagaggtgacagtgacctgggatagagtgggacccgagaagctggaaagaaggggatggactcagcatatatgaatattttcacagggcagctgaaaggacttgcagattgactggatgtggggggaaggaaggaattttaggatggcccccaggcttcctgccttgaaagtcactatctgtgtcacagaaatgaaagcaggggtgttcaccaattcaacacgtttattgggcactgagctatatgtaggaaattgtgccaaagatgtgctgacttaagtttccccaaatgcccgacccatggatgctgtaaagaaatgctgatgctgggcgtggtggctcatgcctgtaatcccagcactttgggaggctgaagcgggaacatcgcttgagcccaggagttggagaccagcctgggcaacatggcgaaatttcgtctctacaaacaaacaaactaaaacaaaaaattagccgggtgtggtggcacgaacctgtagtcccagctacttggaggccaaggtgggaggattgcttgaggttgaggctgcagtgacctgtgatcacatcactgtacttcagcttggatgacagagtgagaccctgtcaaaaaaaaagacaaaagaaagaaagaaagagagagagagaaagaaagaaagaaagaaagaaagaaagaaagaaagaaagaaagaaagaaaaaggaaggaaggaagaaagaaagaaagaaagagaaagaaagaaagaaaaagaaagaaaggaaggaaggaaggaaggaaggaaggaagaaagaaagaaagaaagaaagaaagaaagaaagaaagaaagaaagaaagaaagaaagaaagagaaagaaaacactgataaacgagcctgaagactagctccttaccatggccctggccttagcagctctgcgatcctaggcgggtgagccaatgtcccttaatttacccatagaggggcaattgtaacagtcctttgtgttcccactgagtgctaaggggaaagatacaaattacatgtaggaaagaattctttcaagttaaaagcccatatgtgttattagacctaacatatttaatatctatgtactgttcagcctttggaagtattagttattacaaagcccaatctgtcttaaatcatgaaatgaccattttacaaaaccaataataggaagatgctaaaatgtgggtctcaccctgtcattcccttgcttaaagccctttagtggattactgtggtagacaaaataatggtccccccaaaggtgtttacactctatttccttgtaactgtgaatgttatattacatggcaaagggtagaattaaggctgcagatggaattaaagttgctaattagctgatcttttttttttttttttttttgagacaaagtctcactctgtcgcccaggctggagtgcaatggtgcaatctcggctcagtgcaacctctgcttcccaggttcaagctattctcctgcctcagcctcaagagcagctgggactacaggtgcccacccatgcctggctaatttttgtatttttagtagagaaggggtttcaccgtgttggccaggctggtcctgaactcctgacctcaagtgatccacccaccttggccccccaaaatgctgggattacaggcgtgagccaccgcgcccagccagctgatcttgagatggggagattatgatggattattcagaggggcccaacataatcacaagtgtcattattagtgaaagagggaggcaggagagtaggaatcagaggggatgagatgacggaagcagaagtcggagtggtgtaattgctgggtttgcagatcgaagggggcccacagccaagggatgcaagtggaaaaggcaaggaaacagattatcctagagtttacgaaagaaactcaaccctgccgtcaccttcattttagcccagtgagacccatttcacatctctgacctcaagaactctaagatactacatttgtgttgttttaagtcactttgtttgttgtgattacaagcagcaacaggaaattcatacactcaccaacacctttaggaaaatgtccaacctgcttagcatggcacacaaggaggccttgtgggatgtggtttctgccactgactttgagcaagtttttaaatttctctgggcctcagtttcatcatctatgaaatagggaggaaaaaaaaccctctgtaggtctgtagtaagaataaatgagaggacatgtttcaaatacctagtagaaagactggaacacagtacattattattattattaccattggcattactattatcatggaacagttgacagagtaggaacccttgtctctactcccttcattagggctatgtttccacatctgtgaaaaaggaaacaagaccaaacaggtttggaaacctcgtctctcccctctactccactctttcctagttactgatccgtgtcatgctttgctttctctgacttccaacttcgcctaatgctcttctttctgcctggaatgctcttcccatcctccttaccaagctaactctcatttcctcctggaagtctttactgactcctattagacttgtttagatcctactattatgcattcaaaaagaatgctaaacttcctctatcatattattgttatggcctgtgtgtttttcattggggaaaaaaatcttaaatccaggtaaggatattttgatctatttgcttccattgtgttgtttaaataaaacaaaaacattctaaataaacttgaagtagttaagttcccttttctctccccacttccttcactctctccccaactagtatcataaatttagtgcatatgttttgacacgcagggatactcaccactatactcacgaggattggctatggtgcatatcttttgagtctgtgtttttaaactcttactacctatacatacaaaataatatgaaatatacttttatatgtgtttataattaacacaaatggtaacctttaaaaaacatttctcattctacaactttcttttattcactcaataggttttggggatatgtacatactgatataaatctggatcattcttatcactgtatggtattttattattagaatatcttggccgggtgtggtggctcacacctgtaatcccagcactttgggaggctgaggccagtggattgcctgaggtcaggagttcgagaccagcctggccaacatggcaaaaccgtctctactagaaatacaaaaattagctgggcatggtggtgggtccctgtaatcctagctactcgggaggctgaggcaggagaatcacttgaacccaggaatgtggaggttgcagtgagccaagatcgtaccattgcactccagcctgggtgacaagagcaaaactccgtctcaaaaagaaagaaaaaaggaatatatcccattttattcatctatcaccctactagtggacatttagattgtttctagtattttctgctgttatcaagaacattgcaaacaacatccttatacatatgacctatgtagtggtgtaaaaatttctttaggaaggttgtcaccttgcacattaactacaagatgaaaggtattccatggagatgtgggcctataagatatcgtctagtagtggaatatctgggttgtaaggtgtgtgcattttcaactttatgagatattgccaaattgcctcccaaggtgtgaatagcatgtaaaggctcccgtttccccacgtcctcactaacatctgacctcatgaaaaacattgacatattttttgtatagctgatgtatttcaaatcatacgattatttttatttacattcctcactaacatctgacctcatgaaaaacattgacatattttatttttgtatagttgatgtatttcaaatcatacgattatttttatttacatttctcaattggcttactggccatttgagtttcttctgctgaaaattccctatttatatcctttgcccatttttcttttcttttgtaggggtgagggtggggttatcttttccttaatggtctgaaggagttccttgagcaccaatcctttgttatatatgttgtaagtgtttcctcccagtctgtagcttatcttttaatcagatttaccatgtcttttgtgcagtggcatgatctcggctcactgcaacctccgcctcctgggttcaagtgattctcctgcctcagcctcccgagtaactgggattacaggcatgtgccaccacacccagctaatttttgtattcttagtagagacggggtttcaccatggtggccaggtctcaatctgttgacctcgtgatctgcctgccttggcctcccgaagtgctgagattacaggcgtgagccaccgcgcccggcctggcagtttaaattttgaggtagtcagatttaaactgatcatctttttcctttatgaatagtgctttattattattgtttatctaagaagtcctttcccaccccaagataataaatataacatgtatatgtcttaaatatttgttatatttatttaatccatttaattaggcatctatttttcaaccctatggaaagtaaattctcagtgccatttactgagtcctctattttttccccagtgatttataatgccacctctattatacatcaagtatacacacacactctctcctgtgtctgttttgaagctctactcctcattggcttggtaggcagagaagtgtctccttgccccaacatatacacattgttcttttgattttgacaagatttctcaaaaatcctgattggattggggaaaatacacatctttctgatattgagccttcccatccatgaacatggtatatcattgcatttatttgatgtcctttaataatattttataattttctctatgagaatataaactctattagggaaaatgctttgtcagttttcctttctgctgtatttttagagtcaagaacagagcaggacacagagtagaagcataagaatttgtggtttaatgtctttcatatactttattagatctgtttctacatatcttatatttctgttgctatatatttttattgtagtttccaatcagctatggttggtatatagaaattcaatatacagtgagtcatttttggattgatttaaaaaacaaaaaacccttttatttgttctaatactctgtagattatcttggatttttaaatgcagacagttctgatggacatctatttcagaagggaagaatggatattgtgtaggcaactagcagcatcttccacactactactgtatgaagctagaagaggcaggtactctagtcctagcagctaaagctgtttgtggactttaaatctgaagcaaatagtacaacaaagcaggtgtctgttgagtattcatttggccaattccagtactagtagtggtatctattgagcagaggtgctagtaccagcaacagcatccagtactatttgcagcagtcttgccagtagtggtgtgggatgtccagtaataatcagaaatggcaccccaatcaaagtttctgcaaactctgattttgaccataattttgatcagatagactccctgaattccttccccattttttaattctgatttccaacaactctgtgactcattcaatatcctaccaatgaattccatttctatttcagttaatcaaagatagttttttgtaaccaaggactctgaacaattaaactctcatgctatctgcaaatgataactttgtctctttcttatatatatctcatatatattatctatagatctaataagatctatgcattcaaataatgaaatgcgtagatcttaagttttcagtttagtcaattttgacaaatgcatatactcatgtaacccacatctttattaagagatggaaatccccatcactccagaaagttccttcatgtccttcccagtcaacccctcagtacttttaaaacttcaatgagctggccgggtgcagtggctcacgcctgtaatcccagcacttttggaggtcgaggcaggtggatcatgaggtcaggagttcgagaccagcctggccaacatggtgaaaccctgtctttactaaaaatacaaaaattactcaggcatggtggcatgcacctgtaatcccagctactcgggaggctgaagcaggaggatcacttgagcccaggaggcagaggctgcagtgagcccagatcgcgccaatgcactccaacctgggcgacacagcgagactccgtctcaaacaaacaaacaaaaaaactacaatgagctatcactgtaatcactaaaaggaaaaagatggacaacatctaatgttggtgaggctatagcccttaagattagaaagcggctgggatagcagaggcgactggccgcgttaccgactgaccaactgaccaggtgacttagtgagtaacttcgttaagtaaggaaactcagtaccattacatttaccgaaagctgacaacttttcagatgcagcgctcccagtttaaggaaagtgcagttggaggcggcgtggggcagagggagccagcctctgaacgaactgccccagggtcgcggagaggcgaggctggaaaagaaaggttgaggaagtcgggggacctaggctgccaggacgcccaatagcctccagaggttctggtggaccagagcctgcgcactccgccgagagcatgcccttggctcatccaatcagagcggcggatccaggcgcctgtctgtcgccttggcaacgggacgcataagcacgcgaggcgcgcggtggcggtttggatctggcccctggggaatcgcgttatgtcgcgaccgaaggtaggagtcgacctgacccagatgcttttatcgtccctagaaaaagggaggaaagcagcagagggattcaaaatcggttggggatgggtgttcctcgcggaatgggtaggggtggggcgggggggcggggtgggttgttctcgcggaggaattccgaaaacaggaagaaaaaaagccgaggaactcagaggaaagactacaagtcccggcatgcaccgcgccgcccaagctgctgcgcaagtcccgcgagcccggccagctggcgggaagtttacacaacagtgggactctaagctccgtgaccccaggggaagttgaacctcagaatttcagatttcctgacttggcgaaacccgcctgcccgtccatccgtccatccatccatccatccatccgtttattcatccattcaaaacaacgctaattagtgtcttttccaagccaagctcagtgccggccaagggacacaggtgaatcagacaaacctctgccctccaagagggcacagaccaactctcccattttaagaatgggaaaaatgaaagtccaagagggaaaatgaattacagtaaaattcagctctccgcaccccaaccgactttttttttttttttgagacggagtctcactgtgtcgccaggttggagtgcagtggcgctatctcagctcactgcagcctctgcctcccgggttcaagcgattctcctgcctcagcctcctgagtagctgggactacaggcgctcgccaccacgcccagctaatttttgtatttttagtagagacagggtttcactatgttggccaggtctcgatctcttgacctcgtgatctgcccgcctcggcctcccaaagtgctaggattacaggcgtgagccactgcgcccagcctccatcttacttcttaatcccagctctcattcatgaatggcaccttcatttctcttctttctttccttttttttttttttttttttgagacaaggtcttacttggttgctcaggagggagtgcagtggtgttatcttggctcagtcgacttcctggactcaagcgattttcctccctctgcttcccaagtagctgggattacctgtgtgtgccaccatgctcagctaattcttttttagtttgtgtagagacagaggagtctctatgttatgttgctatgttgcccagccttgtctggaactcttggcctcaaacccatctcccgccttggcctctcaaagtgctgggattacaggcatgaaccactgcacctggtcaacctcttatttcttttaattccctctcacaacaaaaaatgagtttatctgctttcagagtgccttgaactttgcctttttactacaattcattattcatgtgactatttgtttaacatctgtcttccctgctgctctgggatctaatctgacttgttcttccctgtatccctggtcctcagcagagctgactacagttgatacatgttgaatgactattgaactacctgtctagatgctcagctaaaaaactgggactgttgactcctccatcttcctcacatcccacatccaataaaagcctccttcctttaactttctaaatatgtcttgaatttattttttcctctacctcaactaccactatgctaatcatgaccaaactctcaaattttaaaaattaatactctttaaatacacagattgggacacatataacttttttttttttttttttttggagacagtgtctcattctgttgcccaggctggagtgcagtggcatgaacacggctcactgaagcttcaacctcttgggctctagtgatcctcctgcctcagcttcctgcatatcactttatgaaagtgttagaaaaaaagaaaacaaacatctactgaaatagtcccttcccttgaacccgactgattcctttgaaaggaaggacgaactgcaggttgctgaagaatgcacaaactcttagcagtctacactgtgaatatagtatagacatgggtgtagcagaccatgttggatgaaggaaaaaaatagtggactacttctttgtgatgctatgaattttgtttttgttgttggaaagggaaagaaaggtctcctgtatattgacttaggactttgtggtttctttcaaatgacccaggggaaataggagtatgaacttatttgagcaggaacgttcatgtcagccttaagagaacatgccaggatatactttgtgtaccctcacgaaaatatgcctagagaaggccagaggtcagaataccgcgtgttccaacctttgaccccatctcctcaaggttatggtcgccaagacctcagctctgagttgtgctgggaactctccagagggctaaggggaaatgaggaattggatcaggcaggaatgaagctgggattagtggaaccagctaagcaatgaagctgatctctggttagataatcaaagtcttgggtaagctggtgtggcaaactggtttcagcatggctgtctccacctggtaggtattaccagggagctcagagcaggactccaggaatagagacaggaatgaaggcaggtggcaatgtcaccagcctatgctctttttgactcaacaccaactggcgccattcgtgctaccttccatgaatggcaccaacgagaaataaaattaaagttctctgtttgtagcccatacaagcaactaagccacttttgaatcattttctcaataagataattttttaaaaaaaaactcttgtagccttgtcttttctaaatgcattattttagtggtttggggaaagtatttatatccctgggctgttttttgggtcaagatagtaataggacttctatctcaggcaatatgacagatgagatttcttgaaaagcttattaacacaacacacttaaaactgctgggcaaaatgtaacaaacatcctttgaactgtatagctgacctgtttatgtggaggggtaaggattggtagaagaaaaatccccaaggaacccccaccctaacacacacacacaaaaaggaaaataaaaaaacagaattgtcactaactgattcttcattcgtcatttcccttggggaagacattgattgtctcacaaacaggagttggagagtgtcatggggcccactgggcaaggagttggaactgagacctcaccataaagctggacccttcagagacccccacccttagtaaaggtgtaattagaaccaatttacccttcagcagtgggagacagctaggaagctagtcagcttcagtgcagggaaaaaacctttctcctgagaattctttctttttttttttttttttgaaacagagtcttgccatcacccaggctagagtgcaatggcacaatctcagcttactgcaagctccacctcctgggttcaagcgattcttttgcctcagcctcccaagtagctgggattacagttcctcgccaccatgcctggctaatttttgtatttttagtagagacaggatttcaccatgttgaccaggctggccttgaactcctgaccttgtgatccacctgcctcagtctcccaaagtgctgggattacaggcctgagccactgtgcccagcaagaattcttaatcttagatgagtcctcaggctaatctgagaaatgcttaataaaatgttaccataaagtttactgttcttgggggcccaggcagatgtaaatgttaaacatctctgagtcaaacatctttgactcctataatggtcaaattacataataattacctaataaaagatgttttaaatgaattatataattgcataattacataagaaaagatgttttaaataagttaaaaaaaaaagcctgttcatgataaaccctcagaaaaccagggaatagtaggaaatttactcaatatagtacaggaaactataggaacctacagccaatatcattcttaaaagctgaaatagagaatgcattcctcttgtgatcaggagcaagataaggatgtcagctcttaccacttttagtcaactttgtacaaaccagagttttcaccagtgcaataaagcaagaaaaagaaataaaaagcataaatattgaaaagaaagaagtaagtaagtctgcctttattcacagatgacatcattgtatccagagaaaactcaaaggatttacaaactaccagaactaatcattcagcaagggcatcaaatacaaggtcaatatacaaaatcagttatacttctatatatgtatcagtttccaatgtctgctttaacaaattgtcaccaattcaatggctttttaaagcactaacttattaccttatagttattatttatttatttatttattttttgagatggagtctcactctgtcacccaggctggagtgcagtggcgcaatctcagctcactgcaacctccgcctcctgggttcaagtgattctcctgcctcagcctcctgattagctgggattataggtgtgtgccaccatgcccagctaatttttgtaatttttagtagagatggggtttcaccatgttggccaggctggtcttgaactcctgacctcaaatgatctgcctgcttcggcctcccaaagtgctgggattacaggtgtgagccaccgaacctggtccctatcttacagttcatgagatcagaagtctgaaaggggtctcgctgggctaaaatcaaggtgttagcagggctgccttcatatctggaggctctaggagagaaaccccttttctagtttctggaggctgtctcatggtcccctttcatgttcaatggcagttcttctcacattgcgtgactctgacactctgacattgactctgccttcttccacatttaaggatccttatgattacattgggcctgcccaaaaaatacaaaataatctttctattttaaggttctttgattagcatccttaattccatctgcaattttaaatcccccttgcgttctagggatcaggacatggacatctttggaggtggcctttttctgcttattacaatttactatcagcaggtagaaaacgaaatttaaaaatactgtatccaatagcatcataaaatcaaatacctatgaatgaatttaattaaaaatgtacaaggctgctatactgaaaactagaaaatagaaaaaaatttttaaaagatttaaattaatggagagaccatattattcatgtattggaaggctcagtactttataatgtcacttcctgaaaatatctgtagattcaatgcaatcccagtcaaaatctcaacatgttttttcgtagaaattggcaagccaattctgaaatttatgttgaagtgcaaaggacccctaattgcaaagacaatcttgaaatcagaatttactctacctgacttcaagatttaccagaaagctacagcagtaattaagccaatatgatagtgacataaggatagacaagtaaatagaacaaaacacagtctcgagatagatccacgtatgcatggtcaattgaattgtgacagacgtgccaatgcaattcaatgaggagaggaaaatttttttaaccaaaggctctggagcaactggataaacatatggaaaatggaattgaaagcatgagagaggattaaagataaaatacaaaaagacaaggacagcttgactagtgttgggggagttggaagggcttgaatggaagaatgaaacaagatttcactgtgtttcagtggggcttgcttctgccagttttgtaaagcagtttcctccactcctctccgccgctctttgaggggtaggctggtgtgctaagcagaattctcagatgggccccaagattcccaccccctagagtacatgccttgtacaattctctctccttgagcatggaggagtctgtgaatttgatggtgtggttactatggtggttaccttccattacttaagactccatcataggtgacttggagaggggaggattggaagtcagagggacgtgctccatgtggcctggaggaaaacaaatttgcatgttgtgaagtgcctgtgggggccacactgcagggagctgcaggcagcctctaggagctgagagcagtccccagcagacagctagcaagtaaacagggacctccgtcctacaaccctaggcaactgaattctgcctacaacctgaatgagcttggaaggggaccccacacgccagatgagagccataaccccagccatcaccttgactgtggccttgtgagagctgagccaatgatgcagctaagtcatgcccacgctcctggcccatggaaactgagataatggattcccatcattttaagccactgattttgtggtaatttgttacccagcaatagaaaatgaatgcagatggcaggtctgtcccagctgcaaatgtcatcctgcacaggaccaatttcgatttctctcttcatacgtgccttaggaattggtcttcccaggacagagggccaagctgttttggacatggttgaagtgaaataatacccaccacccactgaggatttgaaaggtccaattggggtgaaaggaatgaacattgctctgagtctttgacctagccccttctgggatcctcaatttaatcaaacattccaagttaagagtaaaaagtccagatcagctgggtacggtggctcacacctgtaattccagcactttgggaggctgaggtgggtggatcacctgaggtcaggagttccagacaagcctggccaacatggcgaaaccccatctctattaaaaatacaaaattggctgggtgtggtggtgggtgcctgtaattccagctactagggaggctgaggcaggagaatcacttgaacctgggaggtggaagttgcagagagctgagattacaccactgcactccagcctgggtgacagagcgagactccatctcaacaacaacaacaacaacaaaagctcagattcttctcacagagtgtattgaactgagctttcaaaactggggttcagggctgacctttggagtactgaaaaccaggcatttgctatactggtcatacctgtggagcaaacctgcagtaaggtggtaccttggatacttgggagttcattcacagcagataaattctggtccatttgctggggacatggtggccagtgggaacttgatcaggctggaccttcgtgtctcagaacctaggcattgttgagtctgacggtttgggcattttaatatctgcagtaagttaacctgggaaaacagggcagatatacaaaaccagttacatccttttcctttcctcattgcagaaccaaaattacaagggccatggattgtcaaagggaaaagagcggtgagtggtcccatccaatccaacaatcacagcgcaaccaacttctctccctccctccccttttcaatccctctctcccttttctacttcaacaattataatgaaaatgatagtagaaggagtaatgctaaaccattattgagcacttaccatgtgccaggctctgggcctgtcactttacctgtattagctcattgaatcctgaccacaaccatttgaagtagatactactattgtgtccattttacagatggagaaacggaagctcaaaaaggctaagtgacttgctcaagatcacatgatcagttaggggcagagctagttggactccagggcccactgtctaactttggtctctcctgcctccttcaacaaccctgtgatgacttgatgacttgcatgtcagctgtgctctgatcttctgcttcactctgcatggataacctgcatgccaaacccagcacccctttggatctcctaaagagaatccacttgcacaaaggaggagtgagcaacgtagactttactgaagatttttgtggggagttagaggaggtagtttacatagcaaatgttttagatagtttattctttggttcattagatatctcctctcctcttctcttctcttctcttctcttctcttctcttctcttctcttctcttttgagtttcactcttgttacccagactggagtgcaatggcacaatctcagctgatggcaaactctgcctctcgggttcaagtgattctcctgcctcagcctcccgagtagctgagattacaggtatgcgccaccgtgaccagctaattttgtatttttagtagagacaggatttctccatgttggtcaggctggtctcgaactcccgacctcaggtgatctgcctgcctcggcctcccaaagtgttgggattacaggcgtgagccaccacgcccagccagatatttttgttatttctaaagtccctcctggctatactaccactgaggagggcatgtgtgatttgagatgcttctctcatgcagtgcccatcttctttgccttctttctctccatactgactatcccaccaacttcaaatctctcactctcttatgtagtgcaattcagcaatgttctgaatcctggccctaaacatacatgcccaccttaacaaaacaaagagcacttaacaggcctgtgttaggctgtttttgcattgctataaaggaatacctgagactttttatttatttatttattttgagacagagtttcgctcttgttgcccaggctggagtgcaatggcctgatctcggctcactgcaacctctgcctcctgggttcaagcgattctgctgcctcagcctcccgagtagctgaaattacaggtgcccgccaccacgcctggctaattgagactgagtaatttataaagaaaagaggtgtaattggctcatgtttctacaggctgtacaagcatggcaccagcatctgctcagcttctggtgaggcctcagggagcttacaatcatggtggaaggcaaagggggagcaggcatgtcacacggcaagagtgggaacaagggagaggtcccaggctcttttaaacaaccagatctcccgtgaactaagtgaaaactcacttatcaccaaggggatgttgccaaaccattcatgagggatccattttcaggatccaaccacctcccaccaggccccactttcaacattgagaatcacattttaacttgagatttggaggggacaaacatccaaaccatatcaaggccccatctacttattttataaaggcacacacacacacacacacacacacacatatatttaccataaaatattttttatttatgtgccttattgagggcacatatagatatgtgttccactaccagtaagagaaaactcataatagtagcttaaacaaattgtatttattttattcacaaagagtgaagaaaaagagtctggagtgctggtacagtggttcaataatgtcagagccagcatcttcatgattgccttttttttctttttttgagacggagtctcactctgttggctggagtgcagtggtgcgatcatggctcactgcagccttgatctcccaggctcatgcaatcctcccatctcagccttctgagtagctgggactacaggctcatgccagtgcacctggctaattttttttttttttttttagactcttgctctgttgcccaggctggagtgcagtggcgtgatctcagctcactacaacctctgcctcccgggttcaagtgattctcctgcctcagcctccctagtagctgggactacaggcacccatcaccacacctggctaatttttgtatttttagtagagacggagtttcaccatattggccagactggtctcgaactcctgatcttgtgatccacctgccttggcctcccaaatgctggggttacaggtgtgagccacggtgcccggcctagctaatttttttaatttttttttttttttgtagttatgaggtctcactatgttgcccaggctggtctccaacacctggcctcaagtgatcatcccacctcggcctcccaaagtgttgggattacaggcatgagccttcatgattgtcttgacctcttcctcatggagaccaaatggccactacagctccagccttcatgtcatgatcaggacaggaagaagaggggagggaagaatcaagccacatctctctctttctttctttctttctttctttctttctttctttctttctttctttctttctttctttccttccttccttctttctttctttctctttctttcttgctttcttgctttcttgctttctttccctcccttccttccttccttccttccttccttccttccttccttccttccttccttccttctttctttctttctttctttctttctttctttctttctttctttctctttctttcatcaaaagagcaaaactttcccaggaacttaccctttctagcagtcttatgtttctatcttattgactagaattgtgtcacatggccaccccaactgcatgagtagctaggaatacaagttatgtaagtgttgttgtactgttattactattctgcaccctgcttttgtcacacaaaatgatatgtttggtgtttatccacattggcacctgtagctctgaatgcattttaactgctacctctgtttcattgtgtatcgcaagttatttacccatcttcctgtggaaaggcacttacgaagtattggttccactagaaactgaccctgagggaaggatgtgagagcaagtggtttatttggaaggtaattccagtgagcactgacagggaagtggggaaataagacagctaaggagagaaaccagtaaaaggtgcatcatcgacaggtaattgctgtggacagtgggctgaatcccccagggaattcctgggagaacgtagaatgcactgcagacttatcctaagtgagagatgagagacttagcggatttatccaccaactccagtcgtcactggttgtatgctgttggcagagggtcagttcacgctggtgcttccaatctgctccacatgctggctgagcagactccgggggccagggaaaaccctcaggtagcatcgaaggtgctggcagtgggaagctctttgatttgcatgcacaggagtggtgaatgccaaagggatatgggtggaccaccaacagttgtgccacaggttatttctataaaaaatattaacaattacatataagcatccttgctcacgtgtttcctggtagaaatgcagagtacaaacccagggtatagagctaggacaggttgctgagtttagggtacgtgcatattcgactttactaaaaaccgcccggtgaccctgcaaagtgtgttctaccagcagaggaggagtttccattgtattccattgttgccaaaacttggacctttatatttttgccagtctgatgtgtgtgacatagtccttgatctttgtaatatgccaaattgctctccaaaggtatgtccaatgtgcaccccatcagcattgtaagataattgtcatttctccacattcttgtgaatatttggtatttgtctgatttttaatattttctgcaaactgatggattttgaaattgtatctctttgtcgtttcgggtctattgcatgtatttttagtagttcatgttgtctcctctattgacttttagctaaacctccttattttatcttttttttttttcatattatttgtagagatgaggtcttgctatgttgctctggctggtctcaaattccagggctcaagtgatcctcccaccttggcctcccaaagtgctgggattacaggcatgagccaccatgcccagcctatttgatattttaaatggttactttagagcagtggttctaaaagtttaagctcagggtgggtccctttacaacttaaaaataattgtgaacccaattgacttttgtatatgtggcatacatctaacaatgtgtaccatattaaaaatttaagctgataaattttattttattttatttttgagatggagtctcactctgtcacccaggctggagtgcagtggtacgatcttggctcactgcaatctccgtctctggggttcaagcaattctcctgcctcggcctcccgagtagctgggattacaggcatgcaccaccacatctagctaatttttgtatttttagtacagatggggtttcaccatgttggccaggctggttttgaactcctgacctcaggtgatccacgcgccttggcctcccaaagtgctgggattacgggcatgagccaccatgcctggcctaagccgataaatttttaaaatacttattaattcatttaaaaagcaaaaaaatactcattacatggtagcataaactttctttttttttttttttgagacagggtctcactctgtcacccaggctggagtgcactggtgtgatctcagctcactgcaaactctgcctcctgggttcaagtgattctcgtgcctcagcctcccaagtagctgggattacaggccatcacgcctggctaatttctgtatttttagtagagacggccaccatgttggccaggctggtctggaacccctgacctcaagtgatccacctgcttcggcctcccaaagctctgggtttacaggtgtgagccactgtgttcggcccaacatttttgtgagttatagttatatttccccaccaaaatgtactgagatgagtagtagtcgttttacatttttgtgactctctttaacgtctggcttattagaaaacatttgactttccagatcttctgtgttcaatctgctgtgatagattgttttggttgaaggacaggaagaaaatctagcctcacaaagatagtatttggaaaagggaagatttgtgtacccttgaaaaagagttggggaccctgaggaatacttgagaccacacttcacaacctatggctctaggggattacaatatgcatccttaccttatcacagtctaccttgaagcataattacaccacttcatgcacaactaagaaccctacagcaacacacttctgtttgctcccctctgatcgtttgtgctgctatttttgtcatatatttacttgtaaatatgttataaacccttcattacattctcactatatttgctttaaatagctacttgaattttttttttaattaagacatggaagaaagtattccatatttaccccactcatcattccttctgaatttccatctggtataattttcctgcagcccgaggaacgttctttagtgtttcttatagtgtggatctgttggcaataaattctctcagcttttatttatttgaaaattgtctttatttcactgtcatattttaagtaaagttttactggatatagaattcgaggttgatctttttttctttaagcacttgaaagatgatattcctttgtcttcaggcttatgttgtttctgatgtgaagtcagctgttctttttctttttttttttttttttgagacagagtcttgctctgtcacctaggctggagtgcaatggtgcaatctcggctcactgcaacctccacctcccaggttcaagggattcttctgcctcagcctcctgaatagctgggattacaggtacccgccactacgcctggctaatttttgtatttttagtagagaccagatttctccatgttggttaggctggtcttgaactcctggcctcaggtgatccgcttgcctcagcctcccaaagttctgggattacaggcgtaagccactgcgcctagccaaagtcagctgttcttgtcttccactcccactctccaccaccctcacccctctatgcgatgtgtcttttttcctcaggcttttttttttttttaagactgttctgtttttcagcaatttgactatggtttacctgggtgtagtttacgttgtgtctgtcttgcttggggttaattgagcatcttggatctgtgagttgataatttaatcaaatttggaaaattttttagccatcatttcttcaaaaaatattttctgtcctatctcttccccatctctttcttgaacttcagttatatgtatgttagactgcttgatattatctcacgagtcactgaggttctgttcatgtataaattttttctctaattcaatttgaacaatttcaattagactgttttcaaatgtacggtttttccttctcaatgcctagtctcttgttaagcacatccattgaactttcaatttcagatattatagttttcccttctagaatttccatttggttctttttttttttttttttttttttgagacagggtcttgctctgtcacacaggctggagtgcagtggtgcgatcatggctcactgcagctttaacctcctgggctcaagtgatcctcccacctcagctccccaggtagctgggactacaggcacgtaccaccatgcctggctaattttaaaactttgtgtagaaatggggtctcactgtgttgcacaggctggtcttgaactcctgggtgatcctgccacctcagcctcccaaagtattgggattacaggtatgagccacttggccatttggttcttttctgcagtaactcatctattcacacattgtatccatcttttcccataaatcctataacatatttataataatttttaaatttcttctctaatgattctgataactgggtcatttatgggtttatttcagttggctctttttcctcttgattatgtattacatttccctgctttgctattgcatgtgttatatttttagaactgcactctggatattgtgtatgaaaaacaattgtatatcataattttttagtctttatatacatatacatatatacacatacatacacacactttatatatatatacatgtatatacacacacacacacacacacacacatacgtacacacactttatagagtatgcgagctccttcctctgactagcaggtttaggggctgatcattcagattcctcctaaagctgagttgaacatgggttgggctgcagctttaattaaattgcgtgtactccaatccaacctccttcactgccgtcttgagcttgttagtatttgagctatgtggggctgcagtgctgattattgtttaatttatttttatttttagagacagtgtctcactatgttgcccagtctggtctccaactccagtttttcatccatcaacataaaaaaatagagacaaatctccaagtaaaaaggttttatttgggaataatatacaagaagtagaactgcaatccaggatgtccacatagactagggcagcccccagcatgtctgagaacaaaggaaaagtttagggttctcttggggaaagaggagatttacgtaagttgtttcaaaagaaagttcattggcgctagcagtgttttttatgagagctggcgagttcagtagcagattggtgagtgtcagtagttgctaggtaggacttggagtctcggagttcttgttaggcccttgcagttttggattgggcctgagaaaccgtgtcaggctagtgttcctgtgttagctgctagctgcccttgtgctgttagcagtactcttgtctcatgtgggaagctgtggtttggaaaatgttcttgtgaaagttcttattatctggcaaatcatgcatgagactcctcccttcatgacctttcctggctctgtatttttatttttttactttttattttttgagatggagtctcactctgtagcccaggctggagagcagtggtgtgatctcggctcactgcaggctctgcttcccaggttccaacgattctcctgcctcagcctcccgggtagctgggattacaggcacatgccaccatgcccggctagaagctgggaaaggcaaggaaacaaattctcccatagagcctccaaaaggaatgcagccatgccaacccatttcagtccctctgccttctggaacagtaaggttattcatgtatttatttatttatttatttatttatttatttatttatttattgagacagggtctcgctctcttgcccaggctggagtgcagtggcacagtctcggcacactgcaacttccatctcccgggttcaagcgattctcctgcctcagactccccagtagctgggattacaggcaccagccaccatgcccggctaatgtttgtatttttagtagagatggggtttcaccatgttgtccaggctggtctggaactcctgatctcaggtgttctgcctgcctcagcctcccagagtgctatgattacaggcatgagccactgcgcccggcctgatttttttgtatttttagtagagacgcggtttcaccatgttggtcaggctggtctccagctcctgacctcaaatgatctgcccgcctcagcctcccgaagagctgggattataggcgtgagccacctagcccggccccctggccctattttgccagggtttgacacaagtgattccattttgaatctgacaactttcacacaccactaattataatgttagctcgagtttttttaagatgcttttatcaagttgatgaagttcctctcagagtttttaaatgaatgagtgtttaatttttgtcaaatgccttttctgcatcaattgatataatcatgtgatttctccattttagtctgttaatatgactgattacattgttttttttgttgttgttttggttttttttgagacagtctctctctgtcgcccacactggagtgcagtggtgctatctcggctcactgcaacctctgcctccccaattcaagcgattctcctgcctcagcctcctgagtagctgggactacaggtgcccaccaccacgcctgactaatttttgtatttttagtagaaatgggatttcacaatgttggccaggctggtcttgaactcctgacctcaagtaatctgcctgtctcagcctcccaaagggttaggattacaggcgtgagacaccatgcctggctcatggattaatttttgaatattgaaccagccttgcctactggaataaactccgcttggttatggtgtatagtcctttttatatattgctgaattctatttgattgcattttgttaaggatttttccatctacattcataagggatattggtctgtggtttacttcttgtgtactgtctttggttttgatatcaggttaatactagcttggcaaaatgaattaggaaattctccctcctcttctattttctggaagagattgtgtaggattggtgttaatccttcttcaaatatttggggaaattctccagtgaaaccactgagcctggagatttcttttttgggaggttttgaattatgaattcaatttccttaatagctatagagctattcaaattacctatttcatattggatgagttgtagtaattgtgctttttgaggaattgttccatttcatctaagctgtcaaatgtaggtgtgtagagctgttagtagcatttccttattgtggctgtgatacctgcgggctccatagcggtagcctctgtttcagtcctcatattgggtagttgagtctttcctttgtcagtcttgctgacaaataggtttgtagattttattgatctttccagagaacttgccttttattttactgatttgctataatgtttttctgtttttgattttattgatttccagctctcctctaggccccctttaacatcaccccagagtgggaggggcacttcattacggccagactggggaggaagtccaggctccacacatggtctccactgctgcagtgggggtgggaggctcattaccgcctggcagggatgaaagcctggctctgtctgtggccttctctgacagcaccgagcgggggtgttgggtgccctgctgcaaactcaggggaagtctggactccctactcggcctttcctggcatcactgggagtgggccacagatgtgttcttgggggtctggctggagtagagcagtgattgcccaagtcctctgtctggctaggccgctcctttcttggtcctttggctaggacggggtgcttttgtcgaagcttttgtcgtctatgcccattggcatttctgggttggtggcttttcatctccatatctgaactatatgagacaaaaaggaaacccagggaattcaccaccatgtagttcccgtggtcctgaaatctccagccagtctgccttcttctctttcagtcttatatttgttttatagatagtatcttgagttttcagttgtatcagtaggaggaataggaaaaagtacatctgcttcatcttcccagatgattgccaggagagggctttgcaaatacttatcatttcatgtaaggattagtcatagcacatggaaagcaaccagaccatgcctggcacatagtaggcttggatacaatgatcgttatttttcaatgatttgaagattctgtaattctcaatctgattatgttaagtgttatcatgctctaatgctaaattctgaaatacagtgtggaactttccaggtatggaacttgacttctcttcctccttttttcctctccttgcgccatcctaggaaaatcattgatcctgagcaaatgttcattgccttgtcttgcagagagcagagagcatcgatccggttcaagaccaccctcatgaacacactcatggacgtccttcgccacaggccaggatgggtggaagtgaaggagtaagaccctccccccagccttgtccctccttccctttgtctcacaggtccttgtcttcctttgtttttctcccagttcccctgggtggccactgggacttgtcccaaagtggctgtgacatttatttagcacccacaatgtgccaggcacattatcactatcatctctgtcttatttaagccttccaactaaaccgtaagataagattatgttcagagttaggaaaccaattgcttaaggtcacacagcattgtaagcatcagagcaggattcaaacccaggcacgtttgtgtcctgtggttttcagtagaaactaggaatgtagctaccacagacctgtggcctggatcctccagtgacgggtccagatcaaggactgctcttccctggccacttgctagttctgtgactttggcctgtaagcctacctttcttctttcatgctggcctctggggatactgattgagacaaaccagcatgtgatgcctggcacagagtaggtgctattagttatggctaaggtttggatgtatgcaatggaaacccaaagtaaaagaggcttcgacatgctagaagtttatctgtctcattgaagtccatatgtaggaagttcagagatggtaagggggccccacagaaatgtgggatccatctgcttctgtctttccattctactatcccttaggtgaggtccttgtttttcatagtccaaggtagagctccagtcttgctttcacattccaaacagcaggaggtaggcaggaggcaataaaaggcataggccaggtgcagtggctcacacctataattccagcactttgggaggccaaggcaggaggattgcttgagtccaggagttcaagaccaacctgggcaacatggcaagaccctgtctctacaaaaaattttttaaaaagttagccaggcatggtggtgtgtgcctgtagtcccagctacttgggaggctgagatgggaaaattgcttgagccgaagaggtcgaggctgcagtgagctgtgatcacaccatagcactccagcctgggtgacagagcgagaccctgactcaaaaaaaaaaagagagagagagaaagaaaaggcaagcccatcccttgaaggacacaactcaggagtctctcacagcttactggccagaccttaaccatgtggccaaacccagctacaagggaatctggaaaatgttgttttttttttttgagatggagtcttgctctgtcgcccaggctggagtgcagtggcacaatctcggctcactgcaagctccacctcccaggttcacgccattctcctgcctcagcctcccgagtaggactacaggtgcccgccaccacgaccagctaattttttgtatttttagtagagacgagatttcactgtgttagccaggatggtcttgatctcctgacctcgtgatccgccctcctcggcctcctgaagtgctgggattacaggcgtgagccactgtgcctggccgaatctggaaaatgtagtttttattcagggaaatacaggctacattttcccaagtaaatgctgaaaattcttttactgtagagaaaggggaaaagggataggaggggtagctgccctgctgcgtggtgctcaggaaatatttgctgcttaccattagctaagtctgctggacactctaacatttcgcatgcatgatcttttaatcatcccaacaaatctttcaggtaggtgttatcatcatccccattttactaatgagaaaactgggcacaaagtagtgaaaatgccatgtttgaggtcactcagcttgtgagggtttgggctgggatttgcattgagtctgctgtctgcagagccacagcctcatcttatagtggcttctcagtggattgaagcaacaaatgagcagatgttatgaatctgtgattcccactgcttgggaaggctttactaaatcatcccatgaaaaattaggagttggctgtggtgcaggtaactcaagacaccagcgtcttctctttagggctttggggaatattacaacaatgacagtgatgttgaggatgtggtgatggcagcctttgtggatttgccttcttggttctcttgtgatcatgctaatatccgcacagggtttccttccctggatccagagaacgggtgtcatgaaaagtgcttggggggagttgggaggagagttagaagagagtgaggtgactagcaggtgggggtggtgtaggggagagagagcaatgtccccatctgctgtgtgacctctgtccactccctgcccctctcctgcctctgctcaatgggcaggggaagagagtctgaggatttgtctggtgctaacagtgtgggagcccagaagcagggtgctccatggctggtcccagattgtctcaagaatccttaaatcaggaagggcccagaggccagggccttttccttcaacacagctctgtgaatccaaggcctcatcctttaggacctaagctgggtctggaatttccagacagaatcaggtctcagttcagactgccaacccatcaggtcagtttagaacagatgtggccagagctgtcccttcccttgcttccccctgagaaagatacatgaagccttggaactatagcaaccatactgtgaccccgacacgatgagcatgaggacacgttaaggatggcagaatggatacttacctggcaggggaaatgccatgagtggaaggaggttttctcagggcaaggctcatgtattgctctcccgatgtgctgacccctgcgattttctccaatgtgggaaactcgattgtgtaatttatgatggtcggagactgggaaggtggaaagaacctgaatctccactgaccttgttaagaggcaatttgatgtcttcctgggtgatttaagagcaacttgattgtgacaatcatgaaaatggtgtgcaaatgaatgaacttttggtatcagaatagaatacgaaatccacacggtggtctacaaggccctgcttgattgggcccttcccaactcttcagtttggtctctgacttctttccttccgccctggcttttcttagtgttcttgaacatgctcttcccaacctcagggccccagtccctgctcttcccagtgctagaaccttccccattgcttttgactaggctgcacctccttatccttcagatctcagctgaaaggtccttccacagggtgactccacccagcgtaggtccctcaactaccccgcctcatggcctctactggatcacgtggcggctcacttcacaattctttattatagagttgtttccttgtttattgttaatcttccccacaagactgtgcgcaccacctggcaaggtattctgtttcctcctgtatcactggcatccaacatggtctctgacacagagataacctcaacacatacatgttggaagaaaaaatatataaaatctttttaattttgataagtccaaaaaatgtatatatatagaatttcgtgtcttttagcatattcacaaagttgtgtaatcatcaccactttttttttcccccacatacctgctgtgtcaaaaccactatctaattccagaacattttcatcatctcaggaagaaaccccatacccactagcagtcattcccatttctccctccctccagcctctgtcttgggccttgtctctatttatctattctggacacatcatgtaagtggaattatacaatatgtaacctttttcctgtcttctttcacttaacgtaatgttttcaaggctcatccatgtagcagtatgtatcagtacttcattcctttttgtttgtttgtttgagatggagtctcgctgtgtcgcccaggctggagtccagtggctcgatctcggctcactgcaagctctgcctcccggtttcatgcccttctcctgcctcagcctcctgagtagctgggacttcattcccttttatgactgaataatattctgctgtgtaggagtaccacatttatttatctgctcattaattgataggtgtttaggttatttccacctttgggctgttatacatgatgctgctgtgaatattcatgtatgaatttgaatggacatatgttttcactttttgttggtgtatacataggagtggagtgactgggtgatatgataactctatgtttaactttttaaggaactgctagacttttctgaagtgactatgccattttacattaacaccaggagtgtatgagggtgccgatttttccacatcctcaccaactctcgttattattcatccatttatttatttatttatttagagaaagggtctctctctgtcacctaggctggagtgcagtggtacaatcacagccaactacaaccttgacctcccgcgctcaagtgatccacccacctcagcctcctgagtggctgggactacaagcacacaccaccataccttgctaaatgttttaagttttttttttggagagatggggtctcattatgttacctagactcatcttgaacttctggacttgagtgatcctcctgcctctgcctcccaaagtgttgagattataggtgtgagccaccgtacccaccctcacatttattatggccatcctagtgggtatgaagtggtatcattgtggttttgatttgcatttccctgatggctaatgatttttagcatcttttcacgtgcttattagcaatttataaatcttccttgaagaaatatctattgcccatgtttaaatttagttgtctctttatattcgagttataagaattttatcttataagggtattcttatatatgatttgcaaatactttactttcttccattttgtgagttatctttcctctttcttgactgtgccttttgcggtaaaaactttttcattttgataaagtccaattcacctattttttcttttgttgctagtgcttttggtatcatatctaagaaaccattgcctaatccaaggtcacaaagatttactcctatgtcttcttctaagagttttctagttttagctcttacatctagatcttcgatttaattttttatatggtgtgaggtaggtgtccaactttaatattttaaaatacttatttttaaacttttttattttgaaataactttagacctacagaaaagtttcaaaaatcatacatagcttcctcttttagcagttttaccacctttccctgttagcagcttatgtaatcacagtacatttgtcaaagtcaggacattaacattgatatattactgttaactaagctgcagacatcatttgaatttcaccagtttttttccactaacatcctttttctgttccagaatccaatccaggatcccactttgcatttagttgaccttttttacctcaaatatatttcagttccttggtctttatttgtctttcatgcccttgacacttttgaagagtacattttgtagaatgtcccttgaattggatttgtctgatgttttctcaccatgaggttatgcattttggcaagaataccacagaagtgatgctgtgcccttttcagtggaactcatcgggggtttgtgatgctgatgtgtcttatcactggtgacagtaccttgattgaccattagattaaggtggtgtctgccagctttctccagtgtaaattaactttttttaaaaataataagtatcttgtgggcagataatctgagactatgcaaatatcttgttcccaacaaactttcacacaatggttctagcattttttgataattctttttttttttttttttttttttttgagacagggtctcactctgccgcctaggctggagtgcagtggtacaatcatgggtcactgcagccttgaccctctgggctcaagtgatcctgccacctcggccccctgagtagttgggactacaggcccatgccaccatgcctggctaatttttgtattttttgtagagatgaagtttaaccacgttgaccaggctgatctcgaactcctgggctcaagtgattctcttgccttgacctcccaatgtgctgggattactggcttgagccaccgtgcctggccttttttaaggattcttgcctaaatctattattattacaataattgcaaaatggttactctctgtcattccttctacatgtattaggtggcattcttctgtagagaaagtttttctcttcctgtccctcatttaattatttagtatcagtttggctcattgcagtctatcatcttgcctagaggttaccacacctagattttcccaataggaagctgaggcccagagaagagggcaaggtcacgtagtgccagtgcctgtgttgactcctggtctagtgctccttgcactgtgtgacatggcttggtacaaacatcagggtggagaaaaggcaggactgggcatctagatgaagccccagccagccagccgggaatctgtggcactatggtatctgagggtttatagagcacatggccatttctttttttttgagatggagtctcactccgttgcccaggctggagtgcagtggcacaatctcggctcactacaacctctgccttctgcgttcaagtgattctcctgcctcagcctcccaagtaactgggattacaggaaactgccaccacgctgggctagtttttgtgtttttttttagcagagacggggtttcaccatgttggccaggctggtctcaaactcctgacctcaggtgatccacacgcctcggcctcccaaagtgctaggattacacgcataagccaccgtgcccaaccagcacacggccacttctccagtgggtttccatcagttcttgaaaccgttcttccgaaccactgtgcctggggcacagccacaagggaggtttggagaaggaccaggccccagattttcatgagtaacttaggacaaaatttggaaaccgtagatttctggttccagtgtcattccattaccacgtgcttcacgtcaccacatctgtgcacggtgtgtgcacagatgtccatctctggacatctctgagctcagtgaaaggctgggtctgtctgcctgccttaaagcccctctgcacatggtgtgacattcaggagaaacaccaacccagcagccacaaggagaagcaatttaaatctttagttctttgaaaattccaggccgggcgcggtggctcacgcctataatcccagcgctttgggaggccaaggcaggcggatcacctgaggtcaggagtttgagaccagtctgaccaacatggagaaaccctgtctctactaaaaatacaaaattagctaagcgtggtggtgcacgcctctaatctcagctactctggaggctgaaggaggagaatcgcttgaacccgagaggcggaggttgcggtgagtcgagatcgtgccattgcactccagcctgggcaacaagagtgaaatttcatctcaaaaaaaaaaaaaaaaaaaaaaggaaagaaaattccaaagggatctccatttacaacacaaggcccaactgcttggccattgttccagttgctatggctgtgtaacaaatcccaaaacttagctgcttaagacagcattgcattaggcgcggggctcctgagtcagggactcttacaggacacagtgggactggcttgtctctgtgacattgggggcatcagctgggaagagtccagatctggaggtcacctggtggcaggagttgtctgagggcatctgactcacacgtgtggcagtcgatgctagctgtctgtggggatctcactagggcagacagccgaagaaggttctcatgggttctccttgcggcctcacggccccgcagcctctggataagggatatagtgtaggaatcttttggaactacagtctgcccctgcatcctccccattggtcttgttcagggcctcttccttcatcatcccaaggtgatggtgatgtctcttcatttttctccatttctgcctcagacctcctccagatgtcttttaaaactcagcctacttgtctatattagagaaaaggggtggggagaaagggagacaaaccaaacaccttttttttcttttttttgagatggggtctcactctgtcacacacgctggagtgcagtggcatgatcttggctcaccacaacctccacccccctgctcaagtgattctcccacctcagcctcctgagtagctgggactacaggtgcatgccaccactcctggctaattttttgtgtttttggtagaaatggggtttcaccatgttggccaggctggtctcaaactcccaaactcaaacaatccatccaccttggcctcccaaaatactgggattacaggtgtgagccagcacacccagccccaaacaccttttaataggaaaatggatatactgtggcgtgttcacccaatggaatgggaaatggcagttagaataactcgacccctatgtatcaaaaggatcgatctccagaacaaaagtttggtgggaaaaaagcatgttgtgaaaagaaacagacaggaggggttctaaccacagagcttggactctggagcctgaggcctgagttcaaatcctgctctgccacttactaactgcatgaactaggtgagtttctctgtgtgcctgcctccattttctcatctgtaaaatgggtataataacagaacctaacacttcaggttgcactgaggatccgtgaatgaatatttgtgaagtgtttagagcagtgcctggtacatggtaagcaataagtattagcgttaggtttaaaatcatgacaaacaacgccatgtgccatgatgcatggatacacacatatatacatgatgaaactataaagccactgcaggccgggcacggtggctcacacctataatcccagcactttgggaggccgaggtaggtggatcacctgaggtcaggagttcgaggccagcctggccaacatggtgaaaccccatctctactaaaaataaaaaattagccagttgcggtggtgggcacctgtaatcccagctactcgggaggctgaggaaggaaaatcgcttgaacccgggaggaggaggttgcagtgaactgagatctcgccattgcactccagcctgggtaacaaagtgatacaccgtctcgaaaaaagaaaaaaaaaaaaccactgcatagaaatgataacacaccaaactcaggctgatggtttccttcgcggcagaacagaaggagatacaatcaggcagggatagacagggggcttcagttgtatctgtacttttttacttaaaaataattgtgaacaatcatgatagtgttttatttcctgtggcatctttttcaaacacctcctccccgcaccccagctctggcacccagatttggtagattggcccggtttcctctccctggcatggtggtggagaatgggatcagaatttggagccggcagagctgggtgtgggtcctgctgctgccatgtcctcagtgagcaaggccatcttgccttagagttctggggatgatccaagatcacctttgggggctgctctgaggatttagtgagtggagagttttgtgaactgggaggggcttgcaaaggttatctcattccactgcgggctgcacgcgtggcaactggcaagaacaagtgaggctgagtggctgtcacaccacagagagtcatggggactgtggtttgaggagggcgtgccctgtctgaaggggtggctgctcctcagcccagctaataggtgccaggaggcactctgggctcagtgatagctcaagggaagccaaccacctggatttttgtgggaacatttccctggcttttgctctggtctaacaaagcacatgtaggccagtggcacccatggccacctccaagagactctagagggacacagtgctgtgtacccttcctcaagccccctcggcagcacctccctgggccctgcagtgccaaggtcctcagaccatgacctttatccccgcccccaccccacccccagcgaaggggagtgggatttctactggtgtgacgtcagctggctccgggagaacttcgaccacacctacatggatgaacatgtgcggatcagtcacttccggaaccactatgaggtgagctgggcaggcgggagggactgtgccaaccaactcatgtcactgggtgtggccatgagctggagctggtacaaggatcagaaaagtgtattagaatgtgggatgcaacgccgagtgggaagtctgcgggctagacctatggagagccaaatggtttcagggtatagggatccaaggcctgaggactggaggtcacaggctggttggagtttcagcaccaagatttgaggagcaagatggtttgagggtgcagggtctgaagggagaggatgcatgaatgattatggtgatttcagggtggaggcaagttgagaagtttggggtctaaagatgggaaggaggtctagaagggacaggactggaggaggcagtggtgggagatttttaaaggttagtgtagcttagcggttgaaagcatgatttttttttttttttttttttttttttgagacagagtcttgctcttgtccctcaggctggagtgcaatggcatgatctcggctcattgcaacctctgcctcctgggttcaagtgattcttctgcctcagcctcccaagtagctgagtagctgagattacaggtgctcaccaccatgcccggctaatttttgtatttttgttagagatggggtttcatcatgttagccaggatggtctcgaactcctgaccttgtgatccgcccaccttggcctcccaaagtgctaggattacaggcgtgagccactgcgcccggccaaaagcatgaattttggagtcaagacaggccctggtcaaatcctggggcagtgcagcaccttcgttggatagctctgagcaattgacttaatctttctaagccccagtttcctcatctgtgaagtggggataattcttgactagcaagctctttctgggtcaaagttactcttactgttgctattttgtgggccagagcatggaggctgcagggtggctggtggatgtgtggggctgggaggggagcggggctgtgagcaggagctaatggccgcctgtccttcccgccacccagctgacccggaagaactacatggtgaagaacctgaagcggttccggaagcagctggagcgtgaggcaggaaagctggaggcagccaagtgtgacttcttccccaaaacctttgagatgccttgcgagtaccacctgtttgtagaggagtttcgcaaaaacccaggaatcacctggatcatgaagcctgtgagtgcccagtgccaggggctgggtgggagggaatgagtcccaggtgccatagcagggatcaggtgcagacactgcctgggaattcagccttagatgctgtctgccttcccgaagggccagctttagctcctcttctctgcagtgtgtggacccagcagctatgactgccagcatacagtaggtgctcaatgagtgtttattgaatgcacaagtgatgtttaggacgccagggcagggaatttggaacctgtcttcctgacatgccaagtgctttacctgcgttaccccagtcctcatagtgaccctcgggggagggatcaacagccccattttagcaatgaagaacttgaggcttgcttattcaagcatttcacaaatacttactgagcatgtaccatgtgccaggcacagacctaggtgctgaagacacagccctcagcaagtcagcctgggtctgtgccctttttgcaggcagacaataagcaaacaaaggagacctatgcagttgcagttgtgctgttattaaggagaatggtgtcaggagagggatccacaggaggctcttcctggctgggcaggcttctctgaagaagtgagagactggattctgaggcctacccccttgttcaaatactactgatacacttactagctgtgtggcctcaggcagcttacgcaccttctctgtgctccagttttcccatctgcaaagtgggattgttataatacctatcacctagtgttaggggactaaatgagttaacacaggtaaagcacatagtaagtactcaataaatgagaattgttataataatcagaattagtattgagctgcaacctgaaggatgcatacaagtctgcctggaaaaaagtagagatagggaagagcatcctaggctgagggaactgcatatgcaaaggcttggtatcaggaggcagcctattggggctcaaaaatctgagtggggccgagcatggtggctcatgcttataatcctagcactttgagagtccaaggcaggtggatcacctgaggtcaggagttcgagaccagcctggcctacatggtgaaacccccatctttactaaaaatacaaaaattagccgggcatgatggtgggtgcctgtaatcccagctccttgggaggcggaggcaggagaattgcttgaatctgggaggtggaggttgcagtaagccgagatcgccccactgcactccagcctgggtgagagagtgagactccgtctcaaaaaaaaaagaaaaaagaaaaagaaactgaagaaaggtgaggacaacagcgcacctaccaatcactcagccctttctggtgccacaactgtcactcaccacaaagccacatgccaccgtagccttgaatggcatcatcaaagccctcttatgttttccaggcctgagaatgttccaggccagggagggagcaggagggtggagggagcagccctttcctgtggagctgaagactggtgtctggtgttggctgatgcagatttagccaataacacaggtgcttggaggggaaactgacatggggctgacaaaaacaatggatgctcccaacaggcacgaagccaaggtgtacccaggcctcccaggttcttcccctggcccatcctgcatctctggtgtccagggaaggcgcagtgaggaaggccgtggctggagcagtagggattaggctgatgagcacggagtgctgtgacccaccagggcggattccagctcccagcattatcctctcagacaaatggtaatttgtgctaattgggaacagcacttgcatattaaattgattccattcccagcccacagcctttgttagcagcagacacaacggcagctacagctgtaatttagaggaggcatcttggctcggtgtgtctgtgcgtgtgtgtgtgtgtgtgtgtgtgtgtgtgtgtgtgtgtgtgtgtcctctttcccaaattgcgaggcaccctgtctcgggtggagagtgggcgcttctgtgcttctagtcatttctggcatgggttctaattctgtgtccactgcttacaagctgtatgtccctgagcaggtcactcgacccccttaagtccctctgggctcatttcttcatctgtaaaatggaattaatgagtgtgtctaccttacagggttgtgagagaatacagtgaagttacacacgttcgacacatgaatttacaaattatatcaagggcttggcattaggtgcctgataattgaccattttcattgttatttccgagtccaggaaacaccgtctctttgctctgtccctgggaaagcactaggtcagtgtttctcaaacgctacagtgcccgtgcagcatccagggacctagtgcaatgcagagcctgattcacaggtctgggtggggcctgggaacctgcatttctaccagctcccaggacatgccagtgctgctggtctgtgcatacactttgagtatcgagattgtggagcagcggttctcaaacttgagggtgcagcagaatctcctgaagagcttgttcaagcatcccacccaccccagagtatgattcagtcagcctggtgggggcctgagaatttgcatttctagcaagttcccaggtatagcagtcagggttctccagagaaaggaaagcattagtgtgtgtgtgtgcgtgtatgtgtatgtgtgtgtgtgtgtgtgtgtgtgtgtgtgtgtgtgtgtgtatgtctgtgtgtttaaggaattggctcatacaatattgtgggggttggcaagtctgaaatctgcagggcaggccagcaggatggagcttcaggcaggatttctatgttacagttttgaggcagaattgcttctttttcaggaaaactcagtttttactcttaagccctcaactgattaaatgaagcccctccccatgctatcaagggtgataacttaaaattaatgattgcaggccaggtgagtggctcatgcctgtaatctcagcacttcgggaggccaaggtgggaggatcgcttgatcccaggagcttgagaccagcctgggcaacatagcaagacttagtctctacaaaaaatacaaaaatattagctgagtgtggtggcgagtgcctgtagtgccagctactttgggggctgaggtgggaggaccacttgggcctaggaggttgaggctgcagtgagccgagatcattccactgtactccagcctggtgacagagtgagaccctatctaaaaaaaaattaataattgtagatgttaatcacatctacaaagtaccttcagagaaacatctagcatttgaccaagcaactgggcaccatagcctaatcaagttgacacgtaaaattaaccatcacaccaggttctgagggtgctactggtctgagtaccacagtttctgagaaccactgggtttgagtattagttccgggaccttatttggattcctttcaggaggagagagtgttaaaaacagaacattgccctaaatttggagaatagagggagaagagtcccctgaatccctccactcttcccacaaggcctgtctttgtgacatggttgatctttgcccacccacaggcaaaagttttcgcatagttggtgtggcccagccagtcacagggcagccctcgggcatctcctctgcattgttttcctggtgtctgccgagccttcatcttcctcatcagtggcagcagagcagcccaggactcagaagggagcaggcagcatcattccgtctacaccaccctgtggggaccctcttcctaccaggccagagccccagcccatcttggagcttttaggggaatataagaacaggctcttgggtctggcatttaaaagtccagtgtaaacattgcatcgctcttagctttcttcccatggaagcattctcccctgccagcagttcaggccgtcagggttggtggggaggtgggcaggacactgacacaggtcatgggacaactgtggctccagcccgcctcgtggtgcggggaggcgactgcttggctgtcacggatggggcctgtcagtctctctgtgtgccccccaagctgctcagggacagggcctatctatctgctcaccctgcgtccaccaagctggtctaacacttcacacacggcagcgagcgttcttggcaaccagggggctgttctcagccttgggggcctatttccaaactgcaaggcaggaagagccacattttaacattccatcacactagtttaccccaaccagaacttctcagaatttttcactgagactttctaagagtcgggatgctttactcagtaaataatagaaaatccaaataacagtagcttaaacaagagggcaagacttctgtactgtttttatgccatgggcctctttgacatctggtgaaatgtgtggaccctatcacagaatagtggtgtttttttaaccacttcattgaaacataattggcgtacaacaagctgtgcgtatttaatgtggacagcttaatgagtttggagataagtatgtacccatgaaagaattgtggttttaaaaacataaaatacagtacattccattataaaagaaggcaactatactgaaaacccgttatcaaactgtgttaatctgggttccccaagaaacggatgccaagacaaaattaaacagtttggctggtgagaaaaaatggggagggagctagcaggtgaggctgggagagaatcaggcctccaaggaagcgaagaaagaagagagggagggagggaggaaggttggaagtttctattgctgagcagcctttgaaagttcatcaaggcccctgggaggcctcagccaaagttggctgtcaggagtcccctgtctctcaggaatggccggtcttcatatcccctggggcttagtcactgactgggagcagccctagcaagacgccctggcaaacactgctagacctcaactggaagccgctggcactctcagtcagttactctgttggaggcctgcaaggtgcattgtcatggccaccacacaagcgattacaaaattatttgtgctatagaaatatgtgcgcttttcattaacaattaaagaggatctaacagcaggcctcacagctaccacaatttcaaagtcaggaggagcataaacaatattttgagatatctgcaacaattgtaatgtgatgtcgaaatcactgtgatctctttagatggcaaagtcacgggcatggctaacactcctatgatttgttgcattcctaatagaaaggaatgtgaaaatcggccgggcgcggtggctcacgcctgtaatcccagcactttgggaggctgaggcgggcggatcacgaggtcaggagatcgagaccatcctggctgacatggtgaaaccctgtctgtactaaaaataacaaaaaattggcagagcgtggtggcaggcacctgtagtctcagctacttgggaggctgaggcaggagaatggcatgaatccaggaggctgagcttgcagtaagccgagatcctgccactgtactccagcctgggtgacagagcaagaccctgtctcaaagaaaaaagcataatataaaaatatatccctcccaaaccatcaagtaatagagctgcccccagaactagcagtgtttatcctgtgattttgtgtatccccggcacttttcaagaggtatatgagccccaggtttgtgtagcacagatttaactatctcagatttgtcacctgttggctgggtgaccttgggcaatgtgtttggcctgtctgttcgctggttctcttggctgcaaaatggggataacattaatgtttatgtcaaagggtgtgtgttttttttcaagctttaatgaggtaacgtgtataaatcacggtgtctggcacagagtaaacacctggtaagtattggctgctggtattgccattgttatgaaccattctactaaagctcgtattccggttatctatttcagagtagcaaaccactcccaaacatagtgacttgaaacaacaataatgccttatttagttcatgtgagcccccagcttggacagtgcttgacaaggaaggctgctccagcatccactgagggctggaggatccccttcctagctggctcactggctgggctagcaagtaggtgccagctgttggctgggaattcagccagagttgagggctggaagactcagttgccttccaggtgggcctctccctgtgacctgggcttcctcacgggatggctgctgggttctgagggcaaccatcctgaaagagagagccaggcagaagctatattgccttttatgacctggcattggaattcacacatcacttctgccataggcaattagtagagacacttccagattcaagggaggggacattgatttaccttttgacagggttctggagaacatatgggacaggaaatattgtcgtggttgtttttggaaactgccatctgctggaactaggtattaggtgatttccatctcatcagccccgatgtaacaccatgcaggcggttcatctttcattctttagggttagtcccttaggaaggcacctcctggaacagtcatgtcaagttactaacaatggcctgaacaataaaggcattttgttatctcacagaacaagaaggctgagggtaggcatatccaggtttggggatgtgctagatgatgccactagaggcccaggctccttctctccatcgactctgcatcctgtgtgctggctttttgtcatcagacttgtcacctcatggatgtgacatggctgctgcagtcacaggcatcatctccgcagactgtagcattcaaagaaagaaggaaggagcccgggatatttcttcccgatcccctttctccccagctccttccctaatatttttaacaaggagaaacatctttcctggaatctctgagcaaatgtctccttaggtctgattggccaaaactggtcatgtggtttccaccaactgcaagggaagctgggaaaacctacatctggtctttctagcctccctcatgagaggtgggctttgctagcaaggaagaagaggaaggaaagtggccatagggaaggcagccaacagggttggggataggggttcctagaccaaagcatatgaacctgaaaagataccgtttaattgaagtttaataaaatatagaaaagtagccaaattataggggcacagtatgaattttcacaaagtgaatccactcaaataatcagcacccaggtcataaacagagcgttccctaccctcagcagccctctcaggcccctttccactcactcacaaccccccaaggcactaaacatcgtaggtttgctttgtctgcttttggactttatataattggaatcttataggatgactaccttgtgtctggtgtctctcccttgacatgttttgcagttcattctgctgatgtgggtaattgtacattattaactgtcatcgttgtatactattccattgattaaatattcatccattggggagtctcagggtggagctattatgatagtgctgctgtgggtgtctggggccatgtccatggtgacatgtgcagacatttctgtcatgtaggtccctaagagaggaattgctgggacataggatagaggatgcctatgttcagctttagcagatgctgccagtttccaaacaacgtactctcacaccagcagtgtgtgcaagttccagtttctccacatcctcaccaatacttggtattgtctgtctttaatttaactattctcaggtagtatatagtagtatcatattgtgattttcattagtgtaagaattaaagaaagaggagagaaacacgaaaggtggctcgcccgtcaagacaggtttattttagagaaaacaaacctgagaggaaccttctggctgagttaggtcagagccacactctcttacagactaagagtttttaaggattcagggcgggagagtttattagaggcttggactgcttctgtgtctctttattgtgcttatctgggagggagagttgtgtgtctgttcccatacatctttctgcagctgcaggcatatcccccgggttgcttttagctttcctatcttagtgcacctgaagggaaaggaatgtgcttattaagatctactgttttactggggcccattgtatgagggcgaagtttggcagttacccaagagactttccccccacctccctctgtgcccgagctgtcttatctgtgttttactgtctgctctttctgtctgcttgtagttagaagagaagtgatttccttgaaatgcatgaggccagaaagggaactggaacttaaagtggcagtgtttgtccgagatgacgagatgacggtgctcttgttctgtcaattagcacttctctgttggtgaaccctctgatgaagttgagtgcccgttcttttctttctttcttttttttttaacagacagagtctcacactgttgcccaggctgtgcagtggtgcaatccctgcccactgcagccctgatctcctgggctaaagtcatccttccacctctgcctcccagatagctggtactacaggggtgcactctcatacccagctaatttttaaagctatttttagtagcgatgtgatctcaaggtctttctacgttgcctagacttgtctcgaactcctgagcttaaataatcctcctacttcggccttccagagtgctgggattacagatgtgagtcactgtgcccaagctattgtatgtttacactggtaatcttctttcgtaaaatgcctgttcaagtcttttgcaaggccgtgaactgttggaagctcctgatgcacacttattagttgctttctaaaattgctgtgcacatttggctgcccctgagccaccaccagtgctccatagagtttttggcacccagtcttctgggcccacacaaccctgaaccatggtgcacagcatggcaggcagagcaggggctctttgtgcagtagacaacctgtacaaccacacctggcagccctgcatgcccctatcttgtacagagagcctcgggtgggccaggtgggccatgctcagaggagaacagaaggaaatgagagttgcagttatgctggaggtaagatgacttgggagatctgctcagtggctgcaaatacctaaaggactcttctggcacccaggaatcagctttgttctaggaggtcctaaaagccaaagccagactggccagtcttagctcaacacaggttaggctgtgaacgttccattgcataatgctcaacatacagtatgcacttcatatataccttttggatgactacttaacaaagctatcctgtaacaaaatgggctgtttggcattggtgggggaggtagtgagctgctaggcactgtgagtgtgcaaggccaggcaggaggactgttgtccttctacaatggtagaaggggagtaatgcctttgttgaggaccactccatatgagatcaaagattctctcagcccctagactgtgtgaagctatgaattatccatgctggggttcagtaaaggcaggctgatttcagtattagccggagcaaaccctaattaggaaggcaaattgatttccaaaaaaagatttggatgatatgttcccaggactgttagaaatggctttttaattgtctgttcttttgcattattcatgcaaatgtatgtctttgtgagctaagtcagtctcccccttcccctcccttccctctctccctctgccagggttagcaccttctctgttccagccccttcagctagccttcctctggggagagttgggggttcataaggaaaaagagacagatatgctggggagagcccccagccacgggggccaacaaggaaccacgcagagctaagagctggctttctgcccccatcccaccccaggtagcccggtctcaagggaaaggcatcttcctcttccgtaggctgaaggacatcgtggactggaggaaggtgagcctgcctcttcccccttcctccctgaaccctcctctgaccttgccagcaggaggggccactccttcctgcaatcaaagctcagagggctggcagagaaactctgcccacaggtctgcccattggagcagggtctccagagccagattgtccaggttcaaatcctgatcttgccactcagtcactcaatagctgtgtgcccttgagcaagttacttcacctgtcagtgccccagtaaatggggatggtaattatacctgctaaggatgcagtgagctaataagcaaacacgcgcacacacacacacacacacacattctcacacacacccacacacccagcacagtgcctggcactcagcgctcgatgcacgttctttatctgggcctcctgctcacgtggctggggagagtttggctgactcttcctcagggcctagactgagcctcgggggcagctacctcccaaccccaatccattcttgtcccaagacacagtacagtagaaatcctggttcaaatcctgcctctcccactcagcagctgtgtggtcttgggaaaatgaccgaagccctctgaacctgagcggtgacgatggtgcagggtgggtgggaggagcaggatggctgaaatcctataggaccagcccctgctgtaccaggaggcgcacagcagtgctcaatgtcttgactcctcccatgaaactgtcagggcactacaggaaagagctcagcagcctggaggcccagcctgcctggagcacggtcagtccctctggcagccacgtgagtggaggtagggctgggcccaggtcccaggaagggaagacctggctgcttctgtcttgacacagctgagtggggaacaatggtgggtgaagcaggtctaccctgagagctagtgctgcctgccattattggggctgttgtgtcaccccatcaagtgtgtgacccttgtctttgagtgaaggggacaataggtgggagaggtgtttgcaacctgcgaggtgctgtgcagatgcatgagagcattgctgtcttccagagctgggctggcaggtagagaagaaggagcaatgtcctcgggggcccatgggtggtgtaggcagcactgtccaacagaactttctagagggatgaaaatggatatctgtgctctccaatgcggtgaccactagccacatgcaggatgttgagcacttgccacatggctggtgtgactgaggactggatttataatttcatatccttcttaaaaattgtgggccggcaacagacacatgaaaaaatgctcatcatcagtggccatcagagaaatgcaaatcaaaaccacaatgagataccatctcacaccagttagaatggcgatcattaaaaagtcaggaaacaacaggtgctggagaggatgtggagaaataggaacacttttacactgttggtgggactgtaaactagttcaaccagtgtggaagacagtgtggtgattcctcagggatctagaactagaaataccatttgacccagccatcccattactgggtatatacccaaaggattataaatcatactgctataaagacacatgcacacgtatgtttattgtggcactattcacaatagcaaagacttggaaccaagacaaatgtccaacaataatagactggattaagaaaatgtggcacatatacaccatgaaatactatgctgccataaaaaaggatgagttcatgtcttttgtagggacatggatgaagctggaaaccgtcattctcagcaaactattgcaaggacagaaaaccaaataccgcatgttctcactcataggtgggaattgaacaatgagaacacttggacacaggaaggggaacatcacacaccggggcttattttggggtggaaggaggggggagggatagcattaggagatacacctaatgtaaatgacgagttaatgggtgcagcacaccaacatggcacatgtatacatatgtaacaaaactgcacgttgtgcacatgtaccctagaacttaaagtataataaaaaaaaattgtgggtcgggcgtggtggctcacacctgtaatcccagcactttgggaggctgaggtgggcagatcatttgaggtcaggagttcgagaccagcctggccaacatggtgaaaccccatctctactaaaaatacaaaaattaaccatggtggctgtcacctgtaatcccagctacttaggaggctgaggcacaagagttgcttgaacccgagaggtggaggttgcagtgagccaagatgatgccactgcactccagcctggacaacagagcaagactcattctcaaaaaaaaaaaaaaattgtggtaaaatctgtaacatgaaatttaccattgtaacttcttttaagtgtgtggctttatcacactaagtgcattcacattgttgtgcaaccaccaccaccaccatccgtctccagaacgtttcatcttcccaaactgaaactctgtaactgttaaacacaagctccccgttccctcctctccccagcccctggcaacccccatctaccttctatctctatgaacttgactactccagggactcatctaagtggaatcagacaatatttgtccttttgtatctggcttatttcacttagccttatgtcttcgaatttcatccatgttgtagcatgtaatttcatttacttttcatcaaggtaaatgtaaatggcgtcttgcggccagtgactgccctactgggcagcaccagtctagagtttaaacactcaggctctgggcctagaccatgtaggttcacatcccagcaacaccactaactggctgtgtgaccttggacaagttactctccctctctgtgcttcagtttctaatctgtgaaatggaaataacattagtacttacctgacagggttgatttaaagattcagtgagctacccaaagtagtgtctaacagaatacctagtacacaggaaatgttccataaataaatgttcaattattattattattacaactaggacacaagaagctctgacgaccagaaagatgatattcccgtggagaactatgtggctcagcgttacattgaaaatccttacctgataggaggtgagatggctgtgtctgctcctgctcttccattgcatggtcatcaaacagtcagtcaacaagctttgaccagcagcctgccaagggcccagcctgacaccaggcatgaagggatgcatggaaagagatgggttctgcagtctcccacctcctagccattgcctgtacagttccctctgcccggcatgtccattccactcccttcttggttcagaaaaattctcctcctttaaaaaccaacttattcatgcgtttatccaacaaatattataaagcacctacttggtggcagcactgccctgaatactggctgcccctcaccctgctctcctggagcttacacctgtgatgagcaggctgcaataaaccagaatacaaaccacaggacggtcccatgcagtgctgggtgctatgaagtcagtcaagcagggcaatgggacagagagtgacatgggggccaggaggtggacatgtgagctgagacctgagtgacaactgggagtcactgtgggtagatttggagggagagaaatgcagggaggaggaatcacaagggcaaaaggccctgaggtggaacccagcctcctccccgcaagcttggtgggtttccccaggcgggccaacatctgcttttctcactcgggctctgggaactgcaggcacatcaggcatgcctgacatcattgcaatagcgttaatgccagttgtctcctcccacgtcctctggcaattaccttccccagggggcagcccctgggcctcttctcctctctcccccacagtgaccccatcctgtctgtggcttaaacaccacccaaaggccagtgactcccagctttctgtccccagccgagaccttgcccctgaaccccagatccttatgtccagcagcctgtgacatccgtcttgggcatctgccaaccactcaaacccaacacatcccaaattctgccctcccatccccccaccatgcctcagcttctctaggggacacagctagaagccaggagccattctgggtgtgtcccccttccccttccacatctggttctcaccaagctcccacaagctctggaatctggccattcctctcacctccaccccgggcctggccaccatcctcttcctcctagacaaccacgcccgccccctcactggtgcctgccgctgctctgcccacttcactccaccccaacgtggcagccagagaggagacacccttccatggcttcccatggattgtgagacaaaaccccaaaactgcatgggacctgacctctgccagcctaactgacctcatctccttccactctgcccttggcccaagctctttccccctccagactgttctcgcagttccttctgcccaagatcctgcaccactctgggctgggcaggcaccttgtctccatgaaggtcaccactccccatgggggtctttgaccactgagtttcaagactttcccccaagttgacccccacgcacccctcccccacctcccattattctctctttataccttgtgcgttttttttgttgtgtttttttgagaccatgtcttgctctgtcactcaggctggagtgcagggtcacgatcatagctcatgcagcctccatctcctgggctcaagcgatcctcctgcctcaatctccagagtagctgagactacagatgtgcaccaccatgcgaggctaatttttttgtagacacagagtctcactatgttgctcaggctggtcttggattcctggcctcaagcgatcctcctgcctcagcctcccaaagtgttgggatcacaggcatgaggcaccgcgcctagccccttgtgtagtttcagcaggagcttcatgaaggcggggtttcctgtctgtccactgctattttcccaaaacctagcacaatgtctgacgatcaatatttgttgcacaaattaattttttccttgcctgacaggccgcaagtttgacctgcgtgtctatgtgctggtgatgtcggtgagtaacaaaggtgggggccctcctccagcaggggttaaagggtggctgggctagggagatggggggaagaggcctgggggtaccttgtgtgagcttgtctggttttatctctccctgggagatccccgagggacatctagggatagggtgggggcagggagacttatctgaggtttaccatcttagatgccccaaagtctagatttgccctctctctgcccttctttattcattcggtcatccacagcagacatttattgagcacctactaagtaccaggccctggcacttagcaggttttatctcattcaggcctcctaataacccagggaggcaggttctattattattctccctttacaatgagggaacagatacagaggttgtgtaccttgcccaaggtcacacagttggtgagcagcagagctggcattcaaatccaggcagcctggcctcagagcctactcttttaaccagggagtggctatattccctccacccattcatgcattccttcatccagccaatgttcaaatctttttgctgggcacaggatacaggggtgtccaagacagactccacccctgttctcctggacttcaccttcattttatttccttctgtatccccctccacctggggaaaggaggggatagaatcaaagaagcctggtgtaaaagcaggtgcctgaaggatgatttgggaaagacataagggcactccgggtggaggaaacggtaggtgcaagagctaggcggtgtgagagtgcctgtatatattccctttcccttctctctctctcttcccacctctgccttagtacatcccgctgcgggcctggctctaccgggatggctttgcccgattctccaacacccgcttcacactgaacagcattgatgaccagtgtatcctgggatcctggctaaccacccccgacacacctaccccttcccacactctggccagtcccaagtgaactcctttgtcccacaggtgtttgctgaatgcctgctgtggtctgggcacaggagacagggtatgagataggtctggtcccttccctccgggagcttccagttttgtgggggtgattccatgggagaggccaactctgctcagagcagctcactgcaagctgctctgcctgatgatagttttggtgctatgcctaacattcacatttacttatattcctagggtcggacagttttagcccctttggagaacatttgcatccttttatgtgcctctttcttcagtgcctagtcattggctcactcattcattcaagtacaatgctattttcacccatccgattggcagagaccaaaaatttgataacacagtgtcctggcgaggctgggagaatacatacgttgctggcgggattgtaaattgattggtatgactcctttgaagacaatctagcaaagatctgttaaaagacaaatgcacacatgccctgtgacccagcaattcctcttctgggattttatcatcttacaagtacatctgcggtataagacaagacaggcttcaaggtcattcactgcacagccttgtttgtgagagaaaaaaatagggaacattgaaatgaatggctcctttatacagtggaatactatgaagctgttaaaaaggaatggggaaagtgctttatgtactgatatgaaacaatttccaagatatattgttaattgggaaaaaacaaagcatgtctagaacagtgtttgaaagtatgttctcgttcatgttaaaaattatatctggtcagatgtggtggctcacacctgtaattccagcactttggaggctgaggcagaaggatcacttgaggccaggagttcaagaccagcctgggcaacatagtgagatcctgtctctatgaaaaaaataaaaataaaaataaattagccagatgtggtgtcacatgcctgtactcccagctacccactcaagtgaggtgggaggatcacttgagcccaggagttccaggctgcagtgagctgtgattttgcccctgtatgccagtccaggtgacagagcaagactgtatgtcaaaaaaaaaaaaaatctctctctctctgtctatatatatatgtttgcttatctgtacatagacaactctggaagaacagacaagaagctgggtgcagcggctcacacctgtaatcccagcactttgggaggccaaggcaggtggatcacctgaggccaagagttggagaccagcctgaccaacatggtgaaatcccatttccactaaaagtacaaaattagttgggcattgtggcatctgcctgtaatcctagctactagggaggctgaggcatgagaatcccttgaacctgggaggcggagtttgcagtgaaccgagatcacgccattgcactccagcctgggtgacaaaataagactctgtctcaaaaaaaaaaaaaaaaaaaaaaaagaaactggaaatagatgttgcctttgggaagagaaatgttagtggatacagaggtagaaaggagatgtttccttacacacattttgtgcattttaacttttgagccatgtgaatgtattatctggtcaaaatagacacatcaaaagaagttttaaagatctttaggcctgagcctcagaagaaaagaggtagacaatccagcaatattttggaggcaaatgggcgggaccagatgacttgcacatgggaaagatggaaatgggggtgacgctccccagcttcgggtgtggacaacccagccaatgcttttagcccatttgcatctctctgcattaatttccccattcagttgagtgcgtgtccaaggtgatgcatgtgcattgcctgcatgtgaaactgcgattagacctttctgagtattttttgcaatttgtttttttctattttgccaacgtcagcacttccagtacgttcattttattttgtaattctaacaagcatttatcatatgcaagtcatcgagtttagtttaattgccacctacttttttttttttttaactaaagttaaataatacatgtaaagcagttagaacagtggctggcccagagtgacctctcagtaaatgttagtggtcctcctctcccacttaaaaatgtttgcacagctctgggcatcatggggactttttaaacaaatcaagccctctcccggggctagtttctagttaatgaggctttgctgttttcacagtgagtaaatacacattttccaccccttcttttatattgttttaaatgtttaatcttgaaatattaatagaaaataattttctataaatagaaaactgcaggaaggactataacaacccatgcatttaccatccagatttaacagattaatattttaccacattcgcatcagatattacatactaacttttaaaataattttggatcacaaaataataaacatttttaacctgacttcattatatataatatatatagtttatacataattattcaaatatatatttgcatatagtatatctatacatacactaaatacaaaaatattcattgaaacactgtatataatagtatacagtcatcacccttgatcccttaaatctcccttgagggatggtgaaatgaatgataaagcatctatgtgatcttgtgcatctgttgaaagcaatgagataggtcaaaatatcatgacatagaaagatatctaaaacagatgattaagtgaaaaacaaaatgtaagatggagaacctggtatattcatgttcccatttttgcctttaaggaagaatgtttatgtttaagaaaaagtatgaaaggatgttcgtgattcaccagtctatcttagtgattgattgattgacagtttccttctctgttgcccccgatcgagtacagtggtgggatcacagctctttgcagccttgaactcctgggctcaagtgatcctcccacctcagcctcctgtgcagctgagaccacaggcacatgccactgtgcctggctaacttgttttttgtagcaatgagttctcgctatgttgcccaggctggtctcaaactcctaggctcaagagtgtgaccttgattcaacagtttgaatcctcccaccttgatcttccaaggtgctgggattacaggcgtgagccaccgtgcccagcctcactaatctattaactctgaaaactgcagagaattagaaccaggtcaggaaacatttattttaaactttatacatgtctattatgaattgtttctacaatggataggccttactctaataataaaataataaaacattgaaaggatatagttttataataaaagtggtatagctcatgaaaatcaaatcagaatattcagaacagtgcaaaaagaaagagaaaccttctctaggcatattttctagcagaaacttcttactattttggtgtatttccttccaggctcatttgtagggaattttgttgtcattcaccttttatatataaatgatcccattgtataaatacaacattttcttgcactaaacattatcagcagtattttccttgtagactttttttttttcattaatgaaaatattccactgagtaggtttcctggttttctaatcccccatgctgcaggcatttgggaagtattcaatttcttgctatagtgacacataatgctgcaaaggaacatatttcttcataaaccttttacagtattaagatttttcctttggatggtgtcacaaagatgtaaatactgagtcaagcccatctggccagattgcttcccagaagagtccttttatctttttaccctcactgggtgtggtggctcacgcctgtaatcctagcactttgggagctgaggcggtcagatcacttgaggtcaggagcttgagaccagcctgaccaatatggtgaaacctgatctctactaaaaatacaaaaattagccaggcatggtggcaggcgcctgtaatcccagctactcgggaggctgaggtaggagaatcacttgaacccgggaggtggaggttgcagtgagccaagattgtgccactgcactccagcctgagcaacagagcaagactctatcttaaaaataaataaataaaaataaaatatttttaccctcctattgactggtccatttcatcccaactccccagtcctggggacaattgttttaaacagccatttctgaaacgactgggcatgtctaggtgaagcagataggggcattcattatatgattcttgcaaatattctgtgagttttgaagttttcaaaatgaaaagattttttaaatgcaactgacttgatgagggagcagaattttgccttagaattagcatttcttccaattttcattttcccccatttgcgtgcctttgaaattatatatcttctattactaggaactttgagctttttcccagatggggtcctaccagctttattttctcttttatgtctgtccatatcctttacttagtaaataaacagtcatacattttattgttaattcatgtgggattttcatgtgacagaaacagactattgcatttgctacacatcttttctgtggtcactgattctttaatttttgcattgacatctgttcatttttattttcacatgcttgtccattggtttacttgtccattggtttcctctgtgatttttaccatcatttctaaactaagaaaagtctttttctcctaaatattttgcagtgaatcagttctgtttctctgtggatttattttgattgtatgtttactctgctacttgaccattggtccactgagacctggttttaggttcctctctagagacgggaggctctgaggttggctgacccatctctcacccctttctttcagcctctgcttctcctctgctcctaaggaggcccgctgtctcctccacagcaggcgggagcagtgtgtgaagtgtgaagttctgggagtcgtacttccttcatctgaagagagctatttcccctcttcagccagtaacttactttgccccagcatcctcttttccttttttttttttttttttcaagacagagtcttgctctgttgcccaggctggagtgcagtggcacaatcacggttcactacagcctccatctcctgggctgaagcgatcctcctacctcagcctcccttgtagctgggaccacaggcacgcaccaccatgcccagctaatttttaaattttttatagagactggtctcactatgttgcccaggctggtctcaaactcctgggctcaagcgatcctcctgccttgcccttccaaagtgctgggattacagcctcgacttcccgggctcaaatgatcctcccacctcagcccctcaagtagctgggactatagatgctcgcttccacgcctggctaatttttgtatttcgtgtacatacagggtttcaccctgttgcccaggcaggtcttgaactcctggactcaagtgacctgcctgccttgacctcccaaagtgctaggattacaggcgcggccaccatgcctggccaatacttgctattatctgtctttttcattatagccatcctagtggatgtgcagtggttttgattggcatttccctgatgactaattatactgagcaccttttatgtgcttgtggccacttataaatctcttcaaatcctttgcccattcttaaattggattaactttttattgttgagttataagaatcctgtatgtattctggatactagtcccttattagatacattatttacaaatattttttctcattctgtgggttttctttcactttttgataatttccgttgaagcacagaagtttttaattctgataaagttgaatttatctactttttcttttgccatctgtgcttttggtgtcatatctaagaagatctgcctactcaaggtcacagtgacttattcctctatttttctctatgaatttcatagttttgcctcttatatttaggtctgtggtccattcaaaattaatttttgggctgggtgcagtggcttatgcctgtaatcccagcactttggcaggccaaggcaggtggattgcttgaggtcagaagtttgagaccagcctgggcaacatgttgaaaccctgtctctgcaaaaaataaatttgggccaggcatggtggcttatgcctgtaatcccagtactttgggaggctgaggcaggtggatcgcctgaggtcaggagttccagaccagcctggccaacatggtgagaccctgtttctactaaaaatacaaaaactagccgggcatgatggtgcttgcctgtagtcccacctacttgggaggcttaggcaggagaatcgtttgaacccaggaggcggaggttgcagtgagatgagatggcaccactgcactccagcctgggtgacagagcaagaccctgtctcaaaaaaaaaaaaaaggtctaaagaagacgtctaggaaaaagatgctaaagagtaaagaggataccttttccagagaggctgaaaccaccctactctgttcaatacaccacagactggcagaaccatacatttaggggaattagacttggagtcagagacctagaacctctacctccccatctgagaaatgccccaagtaagtcctggagaaagtcaggtcttatggtcatttcatgaggtttggtactgggtgtggtggctcacacctgtgatcccagcactctggaggccgaggcgggtggattacttgaggtcaggagtttgagattggcctggccaacatggtgaaaccccatctctactaaaaatacaaaaatcagctggcttggtggtgggcacctgtaatccccgctacttaggaggctgagggaagagaatcgcttgagctcgggaggcggaggttgcagtgagctaagattgcgccactgcactccagtctgggcaaaagactacgtctcaaaacaaacaaacaaacaaatacaacaaggtttggggaagccatcctgcttagttgtggggtgaagatgttgaggaaggagtattctgaatggtggtcacttaacttctctgagcctccatggtctcatctgtgagatgggaataatttggggaacaaatgagataatgtgtgtaaacatgctctgtgagctgcaaagtgctgctgatgtcactggtggtgacgatggtgatggtactgagaggccaaatctcagggctgggccttccaaggccaccctgaccctatcccagtgctggatccctttgccaatattcctacaaagtggccgcccagcctggacccctctaatgacagacagcctactgtgtcctgagatggttgttctgtatttggttcctttacttgttagaaccactcctcttgaattaaaaaaaaaaaatcataatataccacaaaggttaaaagaaaagaaaagaaaaaccgtagtataatagctatgccaggcactggaagaggcacagtatttaaccttttgaaaaatcctgtgaggtcaatatactgctatgtacccccattaaaaggtggggaaataggcccagggaagtgaaatggcttttcaggagcccacagccaggaaagatgcaggcaggatttgaatccaggcccatctgactccaaagctcacacacacgaccgtggagctatttcgtagccttccccatcaattctcagttcagtcctggggacttcgtggggcagagctcaccctttttgttcacgctgacccttgaccaccaccctctcccagatgttcacctcaccaacgtggctgtgcaaaaaacatctcccgactaccacccaaagaaggtgaggaagccgggctcggctatgcacgggtacagccctctggcgccaggtcggggtggggagggtggagtggcaaggagcccaggacaggcctgtctgagcctgtgttcaccagtgaggcaggcctacccatcccacttgcagggctcagggcaggactacaaatggaggcccacatatcatgtgtctcagtatttaaaagttgcaaatcacactaacacacacctaaacaaaatatgtcctatcctcctaccttgacagatatcttctattggtcaacggattaatcgattaatgtaatgtatcatacagatatattttatctctctgtctatgtaaaataacctgcaaggccaggttcaaatacagaattctcagacttctcagagtcaagggccagatcaaggggacacaggagagcaggtccccagctcacacctgttcccttctcttccctccccagctccatcccacagtggggcccttgtgcatacacagccctgaaaatggcagcctgtcggtcactccttggccttgggatgcacacatggtcagtgtggtctgtccttagcaagtcaggctcagaaaaggggcctacgcaggccatgtgggcagggacttctggggtcctgcatagccagtcctcttagacatgaagaatttttgcccctcaaagaggggcacacctggggtcatcctaattacagggctcagggctgggcccctcttgcccaggtctaagggaaacactgagagcaattgtgtaagggtcctagcaggccaggtcctgactaactgaggctcctctctcgacccggctgcccggggcccagggctgcaagtggacgctgcagcgcttccggcagtacctggcgtccaaacacgggcccgaggcagtggagacactcttcagggacatcgacaacatctttgtcaaaagcctgcagagtgtgcagaaggtgatcatcagtgacaagcactgcttcgagctgtacggctatgacatcctcatcgaccaggacctcaagccgtaagtgggtgggtgggagagccaggaggtcatagtttgcatactcggcacccagactgcccaggtttgaatcccagctctgccaattcctagttgtataaccttgtgcacacttacatttactgtgcctcaatttgcccatttgtaaatggggttggtcatgacaggatctatccataggtcattagaggatcgttatgaggaataagtgagatatagtctttggagcactgaggaccgagcctggcactgggaggcccttcctgatcatctgctgagtcaggaattctcccctataccaagcaagaaacttcccctctgtaagtcttggagctttgaagatgcaaagagccatataatggaatattgttacaatgtcgatctctgccaagactttgatccactcccaagatgcccgtggaggaggttgagctgacgaatagaacaagcctgacctggcagggaccaccacgatggcctcacatgatgcaacaggacacagaagcccagtgagggtcagggagcttgaggtcatgtagcaagtcaagggcaaagccaggcccagggtccaaggacctgggctgagctgctccccaccagcactgccagctccaggagccaaccccctattcagggtcaccatgtaagtgttgaggggctttctaagccaggaggaggagccctagagcaagacctaagtcaggcccttgctcaacggaaacagggtcctggcaccagcaggtctctctcctttgtcccctgcagcaggatgtgactgctggcattaaggtggacgtggtggaggaataagctctggcccatgcttggacaccagctactgcaggaagcactggagcatccacttgcagccctggggcctgggtagtcaggttaggggagggacctcagttaatcgccacctggcctgctgagacccctaaacaattgccctcagtgctgcccttaggcctggacaagaggggtccagccctgagtgttgtgattaggatgactccggctgtgcccctccgtatgggcaaaaattctgcaggtccaagaggactggctgcacaggaccacagatggctacgtcacctctctgagcctgtttcctcatttgtaaaatgggaaacaccatgtctacctctccaagttgttagagtaatttaccaagataatttgctgtgtagtggaaaggggcttggtctcccacagacctgctgggtgagcccttccctctctgggccccagctttctgtctgtaaaaggatggggttgaacaagacaagaggtggctagcgggaggtctttgggctgcttttggcctgcagatacttcgaatttggcctttagactgtttttgtttttaatttcaatttattgacaggctctaaaatttggaagatgtttacataaaaatcagaattaccaagtacagtgactcaaacacctataataataataccaactactcaggaggctgaggcaggaggatgacttgaggccaggggttcaaggctgcagggagctaagattgcaccactgctctctagcctgagtgacagaactggattctgactctttaaaaaaaaaaaaagtctatttttggcttttctggaaaaatcagatgatctcgcaattctggactcacattcccacagggcggcactctcctggggctggccacagccacccctttagacttggaatgccctctccagctcaccacagtctccacccctccccaccgcttcccaccccctgacacagcaggttgggtgccacctacagtgtgcaaattttcactaagaaagggaagtttttcttgcattcacatctctattggaagaagggaaaacaataacaccacgaaagcaccataatcattcctatgccagctttctacatttgagttacctttcttcaaagtggaaaggtggctcatgcctgtaatcccagcactttgggaggctgaggcgggtggatcacctgaggtcaggagtttgagaccagctcgaccaacatggtgaaaccccatctctactaaaaatacaaagaaattggctgggcgtggtggcaggcacctgtaatcccagctattcgggaggctgaggcaggagaatcacttgaacctgggaggcagaggttgcagtgagctgagatcatgccattgcactccagcctgggcgacaagagcaaaactccctctccaaaaaaaaaaaaaaaaaagtgggaggggcctgggcacagtggctcccatctgtaatcccagcacttcgggaggctaaggcaggaggatgacttgaggccaggagtttgagactagcctgggcaacctagcaagaccctatctctataaaaataattaaaaaaaaatagaaaggtagagagagtagcctggattgaattgacggtggggtccatgcatccatctagcctctcagtgaaatcctaggggctccagggaccgagtaaccctaagactctctactcccctcccttcccaggtggctcctggaggtcaatgcgtccccatcactgacagccagcagccaggaagactatgagctcaagacctgcctcctggaagacaccctgcatgttgtggacatggaagcgaggtgagggagggcagccttgatcacatgtccttgtacatgacaactgaggctcccaccaaggaagagggggagcttagaaccttggggcctgagtggccctcagcgatggctctggcctgccccaccactttatagatggagaagctgagatgtccacagagggtggggtcctgacccaaggacttgacctctccagggcagagcagggccaactacagctttctgagacagtccagcaggatttcctcgaaacctcctgactgtggggctctggactagtcacatcacctttctgagcctcagcttcctcatctgtaaaataggaaatgccatgtctgcctctcagagttgttaatttacaaagataatttactatctagtgcttagctaacagtaagtgctcaatacaaagctattgttttaacaatgtgcaatagcagaaaaaaaaaaaaacccagagctacttttaggaatgggtgaatccaggtgctcaatgttggctggtctattctctctctctctttctctctctctgtttctctctctctccctttctccctccctctccctctccctccctccctctccctctccctctccctccctccctctccctctccctccctcccttctctttcctctgtattagcttttccccgattattccagcagaagtttgagggctgattctccttgctggtaactgggacacattcccattcctaaaccactcactgtgactctgcttgaccaggtatagttcttgtgcccacctcctagggagtggggtcaaccccatgtgagccatggggtgagggagggagggaggagtggttctcagaggaaaacccaaggtactcttggactgaaagaaggtgaaatggatgctgagcaggcagaaacctcaggtatccactattcctaccatcacctattcattcaacaaacatttgagccctgctctgtaccaggccctgtgccataccctgcggacacagtaaggaacacaacagaactagtccctgcctttatggagtttaaggtctgaggaggaaagcagactttaaaccagaaatcacaaatagcggccgggggtggtggctcacgcctgtaatcccagcactttgggaggccgaggcgggcagatcacttgaggtcaggcgtttgagaccatcctggccaacatggtgaaaccccatatgtactaaaaatacaaaaattagctgggtgtggtggtgtgcgcctgtagtcccagctactcaagaggctgagtgaggagaatcacttgaaccaggaggcagaagttgcagtgagccaagattgtgccattgcactccagcctgggtgacagagagagactctgtctcaaaacaagaacaaaaacaaacaaacaaaaaaaacaaataggggcatgttaccaagagcaagtaggaggagccttgggggaaaaatgggaacaacccctcagagacctacataggcacctgggaaacagccaatgaatggttgggaaaaaggacttctgagggacggacatcagttgggctcagggagagatcagggacctcacttgggtcttagggctctgccaggtgcaccttcattaaccctgtgggcctccttcctgtccaggctcacgggaagggagaagcgagtcgggggctttgacctcatgtggaatgatggccctgttagcagagaggagggggctcctgacctgtcgggaatgggaaactttgtgaccaacacacatctcggtatgtagggccaggtggggagtgggcacaagggatggggtcatgggaggtaccaggtagtctaggaggcagcttgggatagtggttagattgtttgaattcaatctgcaacttaccagctgtgtgaccttgggcaagggacttaacctctgttcctcgtttttaaacttggtttctaaaaagtgaaaactttccctgattataaaaaagggattcacactcattgtagaatatttgaaaactagagaaagaaataaaaacatccagacataagcatctttaacaatctggtgtatttccttccagttcttaaaaaatgcatatattcatactttttcttttataaaattggcattgggctagagttttgaatccctcttttccccttggcatttttcattcaagcatattaagagcctccctcttgaatgcactttttggtccagtccggatgaaatcttttacatacattatctcattttatctttaaggagtttttattgtcattttacagatgaggaaatgatatccaggtgctatgtaacttgctgaatgaaggttttggccataagtggtgagccaggactcaaactcccatctgcctggctccaaaacttgagtgcttgtccgctagactctcctgcctcttggcagagtttaaaaaaattaccatatggctgcaaaatatttcagtttgtacatatgccaaaatttactaaaccaatttcttataattggacatttggcacaattgcattttattttttttttacttttataaattataccatgatgaacatcctttcacattaagctcggctgaaattctggccatttcctgaggacagattcctagaagcagaattattgggccaaagggatgggattattacaaccaaatttctttccagaaagattatacgaatttgtcagatttgaatttttagaaaaaagaaatctgtgccaactggtgaggtaaaacatactgactcgttgttttatgtgcattccattgattactggtgaggtttccgttttttaaatttgcatttcttcttttgtaagctgtccatactctttatccatttttctatgggttgtttagttttctaaatgtataaggcttcagatgactatataacactgtccaagcttaatttaatatgcatacaatcacctggaaatcttgttaaactatagattgtgactccataggtctagggtggggcctaagattgtatttctaacaagctcctgggtgatgctctattgattaaccattgctgtgtaacaagccctcccaaaacctagcagcttaaagcaactattttatttgctcatccttcctcaggtctctcctggggtcacttatagggctgcaggcacctggcagatttactggagacttgatggtgtacgacagcctcattcataggtgtgggggttgatactggctgtcagttgggcctctctttccatgtggccactcgtcttccaacagtctggccctggcttcttcacgtggtagactcggggttctaagagggtgagaaaacacactgcaaagccttttgcggcccggactcagaagtcccataaagtcattctgctacaatcaaagcatttgctggtgtagcccagtcactgggtaagaaaatagaccccacctcgccgggcgcggtggctcacgcctgtaatcccaacactttgggaggccgaggcgggcggatcatgaggtcaggagagcgaaaccatcctggctaacacggtgaaacactgtctctactaaaaaatacaaaaaaattagccaggcgtgctggcgggcgcctgtagtcagctactcgggaggctgaggcaggagaatggcgtgaacccgggaggcggagcttgcagtgagccgagattgcgccactgcactccagcctgggcgacagagcgagactgtctcacacagaaaaagaaaaaaaaaaaaaaaaaagaaaatagaccccaccttttgatgagaggagcagcaaagtcaccttgcacagaggtgtgcatataggaacattgttgcagccttctttgccaacagtgcaccaaagatatcaatgcgctacttcctggacccccatttgagtagcaaagatggaaagcggcggttctctatcttggctgcccattggaatcacctgggagctttaaagactactgacgcctgccagatcaagatatggttggtgtgggcatcagtagcttttaaagctcccaggtgattccaatatgcagcccaagttgagagctactgttttttttttattatttttttttgagacggagtctcgctctgttgcccaggctggagtgcagtggtgcaatcatagctcactgtaactaacctcaaactcccaggctcaagcagtcctcctacctcagcctcctgagtagctaggcctacaggcacacaccacacctggctaattttatttttgtgtgtgtgatttttttcctgtagagacaaaatctcactatattgaccaggctgggagagccagtgctttagaagtctctagaattattcctgtttcaagtgtttgggtttatggtggtaaacacaagggtagctggttagggtaggaagagtactgatgaactgagttagggaagcgttcagggacatccaggtgaaagggtcagcagataactcagagatgagtgtagaactccaagaagtttgcactggacaagaagactcgagagttaggaatgagccaaatagagtttaagttagggctgcatggaactcactctggaaaaccctgaggatgtgcatcgtaggctctcagctcagtgaatggctgagtgagtgtctgggaagcagggacagggtttggggggatgtggaagatggcagacacccacaggtcagaactagtggccacagagattcagtcattcaagcagcatttttgagtgccagcaatgtgcctggcatgaggttaaatgaccatagttacctcaaggatcagctctgagagcaaacagccaacatgtagcaccatgaacgtcctgggagagacgtctcagcagctcacggcagcctcagcacgaactgcctgggattgggggccacatgtacggaaaactcatctcttagccagttgtgcctggcacatgggttgggtaagggaagaaagctaacagtactgggcagctatgaggtgccaggcactgtgctagctttaaatgcattttcactgagcaaagccaggagaagcagcagcgtggggtagtggttaagagtgtggctctggcaccaggtagtctgggttcaaatgatttaacctctctgagcctgttttcccttctacacatcattcctgcgagggccaaacaaatccatccacattcagcatctggagcagttcctggcttgaggtaagcccccagtcctcatgttcactccataaggtgggcagtagtatcctggtttacagatgagaagaccgatgctgaaaagggtaactgacctgcttgagggccatggcagtttaggaatggagccaggatataaaccacaggctgtgtgtggttgtctgactcccgctgtcccctcttcccagcagggagttggggcacaggcccctccactcctcccaagcataggtcatcccagccaacaccccacttcctttccaggctgcgtcaacgatcggaagaaacaactgaggcagctcttctgctcccttcaagttcagaagaaagcttccagttgatccccagctgccaggaggaaatcagccttagcaggtgccacccaggcctcccccccactcccagatcccagcacagcacctcacagcattcgcctccccacctccagcctggcaccagctttgctggcttagcagctgcagcttactacctgaattgggccccttggatacctccagcccatccccaggcatctttgcaccaggagacagccaatcactgggactgggggaggtttaaccttgacaaactgacttggcagttaggcccaaagagaacaaatacagcaagttctgctacccccaggagatcatatctaataaatgagcacaggccctacttggagtcactgggcaccaggcctggttccggggatactgttggctgcagccaagtcctcctggctttgacacttggatacctcccaagtcagtgctgaaaaggtccttcaggagcaagagtttggaggctaaggaactcgtctttaagctgtgcttacacagcaagcagttattagattgtgtgtttattgggggcctggggaagtactgagccctaaacacatcctcttctccttgcatgtcaggggagcccatggggctccctgaccatcatctgaaaaccagtgggacagggcatccccatttctcagatggacaagacagaccagggaggcagagcttagtgagggtctctgcaaaggtgcatttatctaagtcagatgggtgacttaagtgcttctctaggccttgtgtttgagattgggagctgagccagaaaccggaaaaccctgggctcatgggcaggacagcttcgggagttgagtgtgagtaaaaatctgccttttcacatcttacattgctaagcttcctcttggtttaagaggggttgcaacaagactcggggctgttggggtaactgttccaggggggacttactccctctaccactccgcctgcttcagagtagtttctctggctgcaaatggttgaatctgcctgcctaggtcaagcccgaagggaagacttttggaaggaaaatactggcaaatccaagaagtgaaccagccgactttaggaaagccagaagccaggctactctagaccttctgccttcagagcatgaggacttctcccactcatccctgtacctgaggcacaccaacccagacaggtccaggcatggactccaggttccctatttccagaaggaatgcgattagctttttttggcccagcacccaccctgccagggaggaaggggcaattttccagtgatgaaattgtgaatcaggcagtcacactggacaacatctagcaaggtgaattctgcaactccctactttatttacattttaaaataagcaatatattcatacggtttaaaatccaaagtttacaaaagggtatagggtgacatctccttccctcccacctgtgcgccccaaccctgcaggtgctgttctgagggaatcacactgtgcttgcacaaaaattattagcttataagacaccagccttccccttgctttcctcacttgatgtatcttggagcttgttccttattcttgattatagttgtatggtattgcactatctggagctaacacctgtgacccacactcatgttttaaaagtttctgcattagtcaaaaatatttaaaaggagattcaacttcacaacccatatgtctagcttctcttgaaaacacgtaagaactggccatgacagcctgtgtttctatgtaactatgagccagagccaaggagcggggggaccaggagaggtgtgcccctgccatgctgccatttgttatcacccgcctgtcaaatcacaggtttatttcaaggcaagaaccatgttcataggttgtattctaaatggagtggcgtgcccttactgaaggactagatgaggcaaataaagactagttgctgctattcattcattcagctaacatttattgagcccttaatgaacacataagagttttgacttcacggcagttcatactgggacctcagaccactgaaggcagacagtaacgagcagtgctggccgggccccactttcagagggggcggaagggcatcttgacacgtgtcatatggtaagaggcgcatccactcacccaggcctggtgcaggactctgcaaggccctcctgagtaaagagtggccacgaagggctgctaggcagcacctactcttggaatcaagcagggaaaaagtgcaaaattggagctggcgggaggtgtgtgtgcctgccccacagatggctgtggtgagccacaaagcaccaagattctgttcttcattcagcaaccacccatgagcctcctgctttattccaatcgcatggcaccagcctgaaaacctctctcccttctgagaggaatgctggaatgacactccactctgcccctccctccctccttccttgctcagggtccatgtgaacagcaggccattgttgggaagtgcctgttgcagtcattcttacacccccacagccactgccccacacacccactggtggctaccaaggcccgtcaatagatcttgtgtccaccgagccctggtgtccaggtccagcagccagacaggctgaaggttccctcctgccatcacagagtagccaagcactacaaagaggttttcatggccagattcctgacggctggccccttacagggcagatcctgtccttacaggtgtcaaggttggagggtcctgggtcctccatgaccctggggggttgctggtcccccatcttggttcttgagtctcatcctttcaagatgaccttgagagctttaagctcatcctggttgagggggttcaagttaaaacccttcagctccggtttgcctaggagagaagatgatccatcagcacgtcgggcctcctgctggctctggagccaggcccaggaaaggggctgacgctgcactaatgctgccaaactcagcctggaggtctggcagggatgggcctccaattctgcaatgcaccagatgaggcatcaccactgctcctgtgtcaccaagagcctgcaaacgcgtaactctgctgcccaaagaacctcaggtttttccaagacctgtgaccaatctagagtgcttgcatttatcaagaatttcagctctgacctcactcactcactgaagccttctgagtttcctcagtcagagctatctgatccccatgccatgccccgatgtataacgtgagatcaccccaagcggttcctgggacctggaaaagaaactatgacaggactaggactgtagaagtccccctgtccattctgtccctgggcagctacaaccaaccactgtgcacacctccagggccactcacaggctgccccggacactgcccatctctgagggtcggacttcccatccctgcccttcaaagtccatgctgatgattccctccccttcttatctccagtccctgctaagccaataccttgggcctcaaaaaggcggttgaccttcactttaagttgcttccgcagtttttctatttctttatccagatgatcttgatctgaaaaaatgaggggggcaagcagaggataagattgtaccagacagacttgatcccagtagtggagaggccagcctctccccagcaagggcgtgtagctttcaggaaggaaaaggggacatcagaggccaactgaggaaggattaaagtctagaagggacatgacctgctcaggaccactcagagagcccaggacacagcagtcccaactcccattacactggccttttctgcattatgcaaagtaccttggggtggtcagtggatggagaaggcaacatcaggactttaggctgccctcccacaatgaaattatggaaaattcaaatgcacaaacaaaataagcatctctagattcagcccaccctagatggctggaaaatggatgcctaagaaattttacaaacccaagtccatcaaggtgagggggttttagaaaaacatgattgtgtaaacatgtgacgtaaacaatcaacacgcaagcaatgctcaagcttaacttaattagccactgtgaacagaaaagggtcttctagtgtcatggactgcccctgagaagagttggtgtgatgacagaggtggctatcaaagcttgattgaccaattgactgaagtcacccagccaattccacctgctcatgagtgacattctggctagcctgtcttccccacagactcactctttcagatgggggagaaaccctgaatggccaagccttacagcctggttctatttctcattgtgaatgagtaaccccaatgtccatgagcttgtttagcctatgttgatccccaagaaatctgataatgtctcagaacccctctaggtacagtgacaagacgacatttgggggccaaaagggccaacaagatcctgaacccaggcaagggaccctctgaaagcttagcctccagcccaccaccaagtgcagtttaattttataaccataatattagtgtattttttcaacacaacagctggaaacttctccaggctggatatagcttcctgttagtagttttatgtcactggccaggagcagtggctcacgcctgtaatcccagcactttggtgggaggccaaggtgggtggatcacctgaggtcacttagaccagcctggccaacatagcaaaaccctgtctttactaaaaaaacacaaaaattagccacgcatgatggcatgcacctataattccagctaatcaggaggctgaggcaggagaattgcttgaacctgggaggcaaaggttgcagtgagccgagatagcaccattgcactccagcctgggtgacagagcaagactctgtctcaaggaaaaaaaaaaaagttttatttcatgaggtatgaagacatcctgtcttcagggactgaggcaaccttgcttgtccttttggccattttcaaggttatggaagaaaaagtatgtgtagcctgttctttttctagccaataatccatttgcagcctgacttgctttaagatgcttttccaaagagcttccagattatggttgtggaaactgagtacactgagtgcctaggctatggcagaccctagaggtttaatctccccaaacctccattttcaacccagtctctattgcagggcatgtaaaaaagaaaagctcactctcccaggctctcttgcagctatgggtgaccatgtgacttagttctggccaatgagatgttggcaggaagtccctgaggagatggccttacttccaaaatagaaggcaaagctctatgtggcgaaagccttctgtctttcctccagcctggcatgaggacatgaggcctgcaacgatgaaacaacaaccaggagaatatgctaaggtgccactgctgggcatctatgccaggactggagtacacacctctggacaatttcttatgcaagagtaaaagaagcatatttccttaagcctcaatttgttgggttttgttatctgcagcccaactgattcctcactaataagaaagcactatgctaggcacacatattgttttacctcaactgcacagctatgctacacagatgcatccccctcttagagatgaggaaataacccacagtggcagaggtggaattaaaacccacagcagtctgaaccctgtgacagaactgcctctccttacgctgcctgaagcctgactccctgttctgggttaagaccaaagctggtgggagaggcagcacacccctgacccatccccaggaggccttacctttttcaatcatttcctttgtctcagggtgaggcatcttgataaacatgttcccgaagcaaaccatcacatcttctgaaagagcaaatagtaattccttcaacaatttttttttgagtacctattatctgccaggcattgttttagatacagacaacagagcagaacaagaaaaagttcctgccctcttggagcttatgttacagtggaggagagagaataaagatatgatttgtcagaccttaagagttgtagagaaaaataaagcaggctaagatggctagggaatgccagaggaggaccttgttaatcatagcaggtagtctgagaaggccttactgattatatgctatctacacagagacctaaggaaagtgagagtgtgagccctgcagacatctggggaaagagtgagccaaacagaggaaacaacaggaacagcaaagatcagtagtgtgcttggggtgttcagaacagcaaggggccgggcgcagtggctcacgcctgtaatcccagcactttgggaggccgaggcaggtggatcacttgaggccaggacctcgagaccggcctggccaacatggcgaaacgctgtatctattaaaaatacaaaaattagctgggtgtggtggcacacgcctgtaatctcagctactcaggaggctgaggcacaagaatcacttgaacctgggagacagaggttgcagtgagccaagatcatgccactgcactccagtctgggtgacagagcaaggctctgtctccaaataaataaataaatgaataaataaaagaacagcaaggagaccagtgtaggtggagtcatgttgggggtggggggagtagagatgatattggcacactcatggattcatgggggctggattactcggtcttgtaggacctctggattttactcaggtgagatgagaagcaactggaagattctgcacattctagtgtactttcaacaaaatgtaaacttcctcccttagcccccaagacctttcattatggcctggtctctgtccctctctccagccatacttactccccatttgcttccactgccacagccacttggcctcatctaaagtgtcccattcttctggatatatattctcaacacccaccccaagtccaattccatctctggctttcttacaattttcaattacgcattttacgttgttttcctcatctgtaaagcacaagggcaggaaccatcagttttatacacccccggcactctctcagtgtctgccatcgttgataagccaggagctaacgacctgtcactgaagtgagcaggcaaaatcctgaaccacagtctgtgccagaactgcaaaatttgctcccccatctccccggactgtttcaatttcccacaaggctgagttatacagctgtgacctcctgcctgatctctatcaggaacaaggtaaaggccttaaaggaaaacggaacaggcctccagggctgcactgagaaaatttcaacttaccagagaggctgagatccttctgcagggccctcaggccctctcgattctgattccttttagtgtccaggtccacaatctgaaaaccacagggacaggagggaactcagctatctcttgccccaagctgtcacctcttgacagacaagggttgcagaggcaatgcattattcctgattacattcaacgtcctgcctaaaatggattgatgtgtgaatgtatttcttctctcactcagcttcctggtcttaaagacaatgctttgtgcagctgccctctccccagaaaagatgctgagaaaacatgtgctgactaaatgggaaattctgcattatccactcgaactttagggcatatcagaatcaccaggggagtggaaacccttcccctacacactgtgattaagcaggcctaatgtttatttttggacaaacttctccagctgattctgaactagtaatatgagaaacccaacaatactagattggaacagcaggattgggggcactgagacagtggtaacaacacaatagctactaaggaagtgacgcagtagtacagtatactgcacgagtgctggttctggatttggaatacccaggttcgaatcctgctatctgcctcaagctgtgtaatttcaccttcctatttactcctcctcaaaatggagctacggacagtacctaccttacaggttattgagccagcaattaaatgacttaacacagtacctggcacatagtaagtagctgataaactttaactgctcttattctcatccagcacaccctgatccagtacttaatttgacaggatcttgcccaagttttccccttctcagtaaatacctgacccttctaactggagatgagagggagtcacgactcccccggctccactaccacggcctactgagtctgtctccaaaatacatttctgaccccttcacttctctccaccaccactacctagtccaaatccatctctggtctggaccataccaatggcccctcacccatctccctgcctccgcccttgcccacctatattctgtattccacacagcagccaggggggatccttttaaaacctaaatccaattacgtcaccctccttcccccaggaactcccctcaaaaacttggcacttaaaacaagacaccccataaacagggcgccaccttcccccacgtccccacccctgcccggtcacaaggccccctcaggcttcttttcggttccagctctcccctgagggcctttacagggcggtgcccctagatcaaccatggggccgggaagtgcattttgaaacaggtgctcagggaaacggcccagagcatgatgggtcgagatccacagagcatggcaaggggcagagaaaggatgaagagagaggaatgtccagcatagcgcaggcgctcacttagtagcggccgaatatttatcggcccaggtctgtcgcctcggagccgttaaccgcctgtccaggtcaactcactgcgaccccgcgcgctttcccacggcgccggccgccaggccccagcgccgcggaggggcctctcacctgccgcttgtccgccagcacctcctcggcgagctcctccacttctacaaggtaccgcagcactcgctctgcctcgggtgatagcatagcgcccaccaactccgcttgcggctctcgcgcgaccccgggatctccgcttcgactcccgctgcgcacgcgccgctctctaggtgcttccggcgcgcctgcgcagttaaaagaacggtggtgcgcaggctctaacactagtgcgccagccggctgcgagaggcggggcctagctttgggggcggggctggagcgccctctgcaggctcagagagctcagtcctcgggctgcctctgacccgttactccctcggttcatgcttcttgagcacttattatgtgccaagcagttttatgtgcttaggatgcagcagtgaacacaacaaaatccctgccctcatggaacttcatcctagtgggaaacaccgacaattaatggcaaaacaattatataccgtggcaggtagtgattaggatctgggaaatattattcttcccctggctaagaaacaccaagaaggcccatgtggcagtgtgacttatgtttaatctctgacactttcagtttctaatttataaaaagggggtgaataaaaatccgcctcagtgtctctccacaggatcggaaggaagcaggaatcagctgggcgcagtggctcatgcctgtaatcccagtactttggaaggccaaagcggggggatcacttgagcccaggagttcgagaccagcttgggcaacacagtaaaacctccgtttctactaaaaatacaaaaaaaaaaaattagctgggtgagggggggcgcgcccgttggtcccagctactcaggaggctgaggcgggaggagcacctgcatctggggagtcgaggctgccctgagctatgatggcaccactgcactccagcccgggtgacaaaacgagactctgtctcaaaaaacaaaggaagcagtaatcacttttaattccgtttaaccagagttcacttgagcccctgtgttgggcccaatgtccagagtagctggcctatacataaggaagggacttgaaaactatgggcagtaagcaatgaagtgctagctcagaaaagcaggtgggtgtgggtggtaggattgggaggacttcccagagaaggcaggcaggtggaaaatggttaccatcagaaccagagggttcccacgaggtcttcacgcccaaactcctcattggatagctggaaaaaacaaacctcagagagaggcaaggctttgaaaagaaggtgaggggtgagccatgtggatgcctaggagaagagtgttccaggcagagggaacagccagcgtatgtggaacagaatgggcgggggggaagcaggcaggaggtcagagggaaggaggcattgagcccacatggctgtaaaaggcgctgggaaaggactttgaaagtctaaagagcagaaccgatattatcactctgatgtctcgcctccctgattccagcgttttattctctccttttgacctcttgtaaccaagccccttcacaccccttgccttacttgagtgtcaaagcaacctttgtatggatgggattattactgccccatttcacagctgcagactgaggccaggagaaaggcagtgcctcatcacacagcaagccaggagtgcctggtgtccatgccatttccggaccctgaaaaaaccctccccaaaaattgtggccccagaagccccagcagcacctctatgttgcctagccattggctgccttcaactaccagaggcagagctaatttttccttcagccacctggtgtggggaaggagggagattcattaaggattcctcactgagggtgaatttgtcgccaaacccaggatgttttgtataaacaccttctggttcagaaatgcaggcacaggccctgagaaggaaagggggatgtttgccaaagcagaaatggggctcaccaggcatccctcggcctggaccccagcactgcgtctcctccaccttgggacccacagagggctggaccaggttgacccttgacccctaccacatgggcctggatggggagaggctgagggaggctcccacattagcagcttcttggcggtaactggcctttagaggccacccctggccactggaaatgttggggaggggaatcatagtcatttccaagactttgaaatggtcagacccagaaagactctcggagagcatttcaatttcagagccatttatttcacaattatgtattgacttcccaggccctgtgatagggattctgccatgagcaaaactggacatggtccctgctctcaggaatctcccagtctggtgagagaaacaatcaacataaaacaagtaaatatatcatatgtcaggtggtaaaaagtgctaccaaaaaaatagcggcttgatgtgggggctcacacctgtaatcccaatactttgggaggccaaagtggagaatcacttgaacccaggagttcgagaccagcctgggaaacatagcaagacccccatctctaccaaaaaaataaaaattaaaaagttagccagatgtagtggtgtgcggctgttgtctcagctactcaggaggctgaggtgggaggatcacttgagcacaggagttcaaggctgcagtgagctacaatcgtgccactgtaacccagcctgggtgacagagtgagaccctttctctaaaaaagaaaagaaaagaaagagagaaagaaagaaaaagaaagaaagaaggaaagaaagaaagaaaggaaggaaggaaggaaggaaggaagaaaggagggaaggaaggaaggagaaaagaaaagataagaaaagaaaagatagcacaggacaaggtggaggtggaataatggaggggctatttgagataagctggtcagagagggtgtctttgaggagatggcatttgaacagaagtgtggaggagatgagggggtgagccttgtggatatctaggggaagagcattccaggcagagggaacagccagtgtatttgaatagaattagtgagggggagagggtaggacagagaggagaaggagacattgagcacacagggctgtggaaggtgctggcagtgccccacccaaaatccactagggcctccccagaggtcacctgcagacactgctgtgtatgcctgtggcttcctgcttctctctgctcatggatgcaggttgagaggggaatgcagtgaattaatatccacgagtgtgaactcctaccaagaaaagagagtcgttagtgactgtatactctagcttctttgcccctctgtgagagacccaagaggaggctgctataatcatctaggcaggagagggtggccactgcaccaagagatagcagtgggggtggtgaccagtggtgggattctcagggcctttgcacatactcccccatcgttctggattaattttctcccatgcctttattcacgtgtcactattccatatcccccactgctcagcttggggttacctcctcctgagggtcaagagtcctctctgggcccccacagttttttggacttcccttgtctctgtacttcccataccatctttgttctctaaacaccttgctttgtaatcatgagctccccagggcagagaccttgtctgtcttgttcactggaaaagtgtccccctctctgggtcatcacccacctccctgctgctgctcacacaagccaggcgtggtcctgcctcagggtctttccactggctgctgcctctgcctgcacttttccctgatgtctacatggttccttccctcaccatctaccagctttttttttttttttttttaagatggagtctcactctgttacccaggctggagtgcagtggcacaatcttggctcactgcaacctccacctcctgggttcaagtgattctcctgcctcagcctcctgaatagcttggattacaggtgtgtgccaccatgctcagctaattgttgtatttttttagtaaagacaggggtctcaccacattggccaggctggtctcaaactcctgacctcaggtaatttgcttgcctcggccttccgaagtgctgagaatacaggcatgagtcaccacgtctggcccagtcttttcttaaatggcaccttttcaatggagcctgccctgaccaccatgtttaaaatgcaacttctgcccctcctgctactcctgatcaacttcctctgctctagtttttctttttctttcttttcatcataacttttgtcacctcccagcatgccttataatttacttatggttattgttcatctccctctgctagaagagaggctccttgagggcaggaatctttcattcatttcttcactgatgtctctcaaatgtctagaacagtgcctggctcccacagtaggtgcttgataaacaattttgaatgaatgaattaatgagcagagtcagaattctacttaaggcagattctctctgaggccagattcttaaaggtgagggctgggatcatgccttatccactaaagtacggggattgggtttgttctcatatgctgggaagctgctggagggtgctgagcaggcacagatatgattgggtttaccttgtgaaagcccctgtggctctggtgataggatgggtgaagaggggcaagtgcagtgcattcctctgagatacgtgtgtatgtgttgagcggacaggagggtgaaaatgggggcttggggaggtgacagggctggagctgcactgagagagcagtgagaggaacccctttaatgtccggattctccaagcagcctgggtggctgccctaccagctctggctgggcctcccagctgctgagaacatgctcctatgctgcagatgggctgtgtgctcgcctgggtggtccctagctcctccctccacttcctttgcacccttgtgggcttggtgggtggaagacaggcttccaccctgtctcctccccgaccccgagaataatcccttacattcatgtgattctcctcgcgccctcacttcatcctcccacatccctgggtaacacaaaaatctgaatcccactgggcagatgaggacattgaggtcaggcaaggggatgggaccctcccaaggtcatgcagccagatggggacaccaggtggggacatgtctcccaactccccacgcctccattttcaccaggcaacagatggcccatggcttgacttgaaaaatcttaagtgatcccaaagagagtgcaagcccagaacattccagccctccttgagctggtttttactactaccttttaataccaaattcattcattttaatttctataaatggattcttcttacggaaactcaaaacattacagagaagactaagctcttttttacccccctccccctcttctcagttccctctagtatcccagtttgggtgtgtcttttcaaaactgtgatatgcatttaaagacatagctgtcaacccagagaaaacccacaggactattgtgagatggtaggacaggaaggcaggtggagggcattgcacacaaacctagtgcttcgcagcattgctcttggacagctttgattgacatttagatctcttttctattttctaatagctgcaaaatattctatagtgaggccagcacagtggctcacgcctataatcccagcattttgggaggatgaggggggcatatcacttgagctcagaaattcaaaaccagcctgggcaacatggcaaaaccctgtctctacaaaaaatacaaaaagtagccaggcatggtggtacacacctgtagtctcagctactcagggggctgaggcagaagttgcagtgagccaagattgcaccactcccctcaagcctgggcaacagagcaagatcctgcctcaaatatataaatatatattctgtaatatatatatatatatatatatatatattctgtaatatatatatatatatatatatatatatatatattctgtagtattttagccatatagtccatttgtttatctcattttctacattgaaatttacgtttcattttcatacactgtagtacagtgggttgagttaatcctgcctctcagttcttagcacgtggtcatgatttagtctgcaaggactctttcttgtttatatcattttctcccacctccactcacttttaacctcactgaaaccctctctactgtatttgatatgtccttaaatactcagaatttcttgcaaaatgcgtcatgttgttttatgtgtttctgtgttttaaaacttcttagcgggaccaggagcagtggctcacgcctgtaatcccagcactttgggaggccgaggtgggtggatcacctgaggtaaggaattagagaccaggctggccaacatggcaaaaccccatctctactgaaaatagaaaaattagcctggtgtggtggcacacgcctgtaatcccagctactcaggaggctgaggcagaatcgcttgaacccaggagacagaggttgtagtgagctgagatcgtgccactgcactccagcctgggtgacagagcgacactctgtctcaaaacaaaaatacataaataaataccaaaccacatacccggtttattagtatcaactaaaactgagcatacctgacaattccagtcctatcattgggtgtaattccacacaatagaaacgcatacatacatgtacccaaagacacacacagagatgttctcagctcactgcagcctctgcctcccgggttcaagcgattcttgtgcctcagcctccaaagtagctgggactacagatatgcaccaccacacctggctaatttttgtattttttgtagagatgaggtttcgccaggttggccaggctggtctcgaactcctggcctcaagtaatcctcctgccctggcctcccaaaatgttgggattacaggcatgagccaccgctcctgaccctgggcatgtgttttgaatccacataaacattattgagttgtaagtcatgttcgtctcctccttttattttttatttttgcctctcctgatgtttctcagatctctccatgcactctagcactctaggtacctctagctccttactcctccagctccagagaactgcagagctgcctctacctcatttcacttgtccactctcttgattatggacacctgagttgctttctgcccctatcaacacacacagtgccacactggacatcctatgtggtattgccttgtcatagggcacacacacacttcttcttccttttttttctttcttttttttttgagacagggtctcactctgttgcccaggctgagtgcagtgccctgatcacagcccactgcagcctcaaactcccgggctcaggtgattctcctgcctcagcctcccaagtagccaggattacaggcacacaccccaccatacctggctaatttttaaaaatttttagtagagacaaggtctcaccatgttgcccaggatggtctcaaactcctgagctcaagcgatcctcccaccttggcctcctaaagtgctgggattacaggcatgagccaccgtgcccagccttctttttcctaaatgctgccacctttctctccaggatggcttcctcattttcactcctaccagtgatgcacatcttcgccaactttgggcatttccacctctctatggcctgccagtgtggtggctgtaagtaatgtatttactcagcccgtctcttgtgcatagacatttaagttgtttccacctttgcagatgatacaaactgctgcaatcatccttcagggacatgcttctttgtacttttctctgagttcaatttcttttctgcctcatcttcctccactcttcttgaacgccagttcctaaacacatcctaactttcccagctctttccctgagctcaggcagtgccttctgccagaaatatcttttgttaagtgtttactcttcccttaaggaccctcctcctagaaggccctgccccacccctgccaccaagagggttgctcttcctcagctctcccagagggactttcattcccttttctcctggcatcagatactttcctgttttggacaagagcagtttttttgttgttgttcatggttttggctttctcaccagcccaaaagcccattgagcccaggggttccacaagcttcctcgaaggtgctcaggggggctcaggagaggtctgtcgaatgactgaagccatgacctaatcatgggaattaagggtacattctccctttctctctctccctcttcttctcccctctctcctgcctctcatccctaccccttaaccaaccagaacttttcaggagtagctagttccactggaaagaggatggaacattcagtcaagactccccctctcttgggtgggcacaggcagctccacccatctggaaagttaatgtgggcctcacttattccctcaggtcaatggctattagtacctgcactcggccaggccctgggatccagtggtacataggacaggcccagtcctggacctcacaggctttcagccatggggacaagattgacaccatgcatgcaccctcctaattgtgataatgcttgaatgaaaagctcagagtccagtgaaattatatagagggcgatcctaccctaaatcagggatggagatggaggaggctttcttgagaaagtgatatttaagcaagatttaaggatgagtagaaatgaactaagcaaatggagaggctatgggtggtggggggttggggcgggggtagagaaagtgcttctgccagagggaactgcaagtgcaaaggcactgtggcaggagggagccaggggaagaccagtgtgtctggagtccaaggagaacagaaaaaaaggggaagagaggctgtaaagatagacagaaagccctggtcaacaaagtaaaactggaaaatggactcgttcactcaataaataattattggatgcccactattagccagaagctgtgctatagcagtgaacatgacaaagtccctgtccccacggagctccctggggacagagaaagaatagctaacctttatagaggccctactatgtgccaggaactgtgctgagcactttgcatgcactatttgcatgcactatttcatttcatcctcaccaccaccctatgaagcaggatacccattttattgaagaggaaactgaggcttagcaaggtgtagtgatttacccaccttgaggagtcttgaggacttattgcaggccatttaaaaaggccttttacaagcaccctcactcaatgctggtgtatggaggataacttggtacagcccctatagagggcaactatcaaaattataaaacacacatgctgttcaatcagcaagtctatcactagaaatttcttctacagatatccaaagtggtgtgtccacaaagtcattcactgaagtattgttgtaaagggctggagaaaacctagctgcccgtgatttaggggaatgatgaagtggattgtggtgtatgcatgcaatggaatgttgccataccatgaaagaataagggcccctctatgcactgataggaagcagtctccaaaaatgctgttatgtggggaaaacaaagtataggactgtatataattatgctatcatttgttttaaaatggtggtggtaggtatacaaataggaagatgagagagagaagagacaggcagagagggagagagggagagagacagactcaagaaactaatagcattgattgccactgggaaggggagctggtggctggaggatagggtaggagagacacttttcagtgtgtcccttttgtacctttgagtttttaagcatgtgaatatattgaccattcactagataaataaatacaattatgtttattgaaaggactttctgactctatgggtaagaaagaggcattgggatgaagaagacatcccaggcttgttgagttgaagatgtcttagtgattcccttttttccgaatgaggaaactgaggcctacagaggcgaggtgaattgctcaagatcacctgtgcaggtaatggcagaactaggactggctattacctgaattgtagtgcggtgcccttttctgtcacactgagcatctgctatatgctgggccccactaagtgctgaggatacagtggtgaacaagataggcatgactgctgccttcatggaactcacattttaggcaagaaacaaataaatatgtattataatatcaggtagtgatcaatgctatcagtgaaaaataaggcaagtgaaaggatagagaatgtaggggaatgggagaaatgatcgagaaaaatccctctgaagaggcaacattttagaaaggagaaagatggagccttgtgaatacctgggagcacagcaggaacaaaagccccatggaaggaagaaggttggcttgttaaaggagacagtgtggctggaacagagtgagcaagggaaagacagtgggagatgaggtcagagaaagggccaggagacagaatgtacacagggctgaggactttggctcaaagtgaggcaggaagcagtcggaggttctaagcagatgtgggatctgatgagatttccctttttaaaaggcccctctggttgaaggtggagattgaacatgaggagaggaaagaggggctgcagggaacccagtgagcaggcaggggcagtccagttgtcctggagagaggtgacaagcctggggcagtgtggtggggagcagagattggtgtccccatctgtccaatatgggagttgaacaagatgttcctttagggcctttgcagctttgggatttggtaatttggtgaacgacctcagaacatatcaactaggtgagccagccacactgtttttcttttctcacaatctccaggtttctccccttgggttctgggtctgaacagacccagtgatctgaggcttagatcggggactcctgcccacccctccctgccagcctgctcctgtccccacctcccagggacagatgggtgggcggcaggagcagctgggccttgatgcctgcagggccctgggggagggaattatctaagagttcataaccctgctctgccttccagatcttgagttaaaagccccacatgtcacagctccaaggggcatgggttggagggtggcaaaagaggggtagggcaagatgcttttcagtcctgtagctgcccacaggggttcagtaacctggggtgctgaggactccaggaagctattagggctgaggctgaaagctggttaccctcaggctgcgtctaacctgctggcttttttatttggcctgaaaagtgtttgagaaaagttggagccaatgcttaaaaatcaaggaactttacagtaaaatccagatttctgacttctcttgaataattaaaaaatctgaccagactgaccacccattcccaattacaacaccccacaggagctgagtagcagctgtccctattattattttattttattaataagtaaatacatgcacatgattccaaaaagaaatcataaattggcatgtatcatgaagtctccctcccatccttgtctgcccttctccccagttccccattcagtaatctctttattttctcatgtaaatttccaaagtttctttatgcatatataaacacataaaaatatagattattattccccttttcacctagcttcattccctattctctgccttgcttttccctgaggaggtctttctgtattaggacatagggagcttgctgctacacgccatcgcattgtcagaagtctcatgatttatttagctggtctcccactgatgggcatttgggtcattcccactatttgcttttataaacaatgctgtatcagtgttctcatgcatagtttgcacaggtgcaaatattttagtcggaactaaaggaagattattaggagctggttcaagcagagggtgcagtaggcaagagctgaaccctcagcaggatcccaaagcaaggctaagcaaggaaacgtgatgaggtctgtttgtaaaagtgattcctggcaaggcacagtggttcacgcttgtaatcccagcactttgggaggccaaggcaggaggattgcttgagctcaggagtttgagaccagaccgggcaacaaagcgaaattcgtctttacaaaaaaatgttaaagactagctggacatggtggtatgtgcctatagtcccagctactcaggaggctgaggtgggagtccaagagtttgaggctacagtgagctatgattgcgccactgcactccagcctaggcaacaataaagagtgattcccaacaaaggtcagggatgtgggggactagggaaaggctcccagattggctcctgccgcttgcaaaaatatgggacttctttctgggcctcagagtccctgcctgtaaaatgagagaggggcttggagagctggatgaaatcccaaaggacttttccagttctgaccagctgtggccaccttctgtctccacaccagacagactcagcctcttctcagcccttgaacttgcctcgctccatcctattgcagagtgcttgcccaaactgatcccaccctggcccccaccactggaacatcacctctgtgcactcctattggtttttgtctgaattgctgaactggcaggccactcggaacacaccagcccaaaccccttcagggtagagtcccctgtacaataccccagacaggtgggtcaccctcatacctgatccacacttcaaatccttctccttgtcactcccctaagtcacctgaacttttagcatagagttcttgaatgccaactctgctacttcctaacaaatggccttgtgacagtacctccctgaatttcaatttctacctgaaaaatggctggtttgaggataacatgtgatggtattagtaaagttcttagcacagctcctgacacacagaaaggcttaataattccataagtcactgcccttgtctgaataagttaccttgtttataaaatggagagaacttatagaacctattctttttttttttttttttttgcgatggtatctcactctgtcacccatgctggaatgcagaaacatgatcatggctcactacagcctcaacttcctgggctccagtgatcctcccatctcagcctctctgatagctgggactacaggtgcatgccaccacactcggctaatttttgtatattttgtaaagatggggccatattgcccaggctgttctcaaactcctgggcttgaacaatccatccacctccgcttcgtaaagtgctgggctacaggcatgagccaccatgtccagcctcagaatttataggggtgatcactcactcacttattcattcattcattcattcacttaatgatttttgtagaatacctactgagtgcccagcatagcactgggcacaaggagatttggtggtgaagaaaatagatgaattgttccaaccctcatggagctcccaggcaattccgaacaggcaaacatacaaagataaattgccagtgtgctgatatgaagaaggaaaaaacaaagatattatggaagctcataacagggttgtgtcagggaaacttctctgtgagataaggatcagggcatggctgggtgggaaagccaggagggtttcctgaaggagacatcaccctagtctaataattagctttaattatcctcaccacagccctagaaggaaggcactggttatctctcattttacttttctctgaagttaagagaaattaagtgacttgcccaaggtgatggagctaggaagggatgaatgggtttttgttttgttttgttttgtttttgtttttgttttttgagatggagtatcactctgttgcccaggctggagtgcagtggtctgatctcggctcactgcaacctccgcttcccaggttcaagcaattctcctgcctcagcctcccaagtatctgggactacaggtgtgcacaaccatgaccggctaatttttgtatttttagtagagacggggtttcactatgttggccaggctggtctcgaactcctgacctcgtgatccacccgcctcggcctcccaaagtgctgggattacaggtgtgagccaccgtgcctggctgatgcatgggttttaaacccagatttcctggctgtggagtctccgacctaaaaacctgtcttctgctgcctctttgaataggcaaatcctgggatatagagcatcatgggaagtagagaggctgccttcacttggatggggcccagaagtgggactctaactttgccgtatcctatccagacaccagtgaaaaggaagagatccagacacatccaagaactgactgaggaccctcagggtggctggggccagagtttctctcctgcccgctaccatccagggctctgtgcacttcattagtctccctgcctagggttgtgggagagaaagaaaaatcagagatattcctttctaaattacactgggattcagaccttccagcccgacccacaaacacccttgctcactaaacatgcctgtcaataggcaactgtcagccttgaatccatcctggaaaactcccttaatccctaactctttcccctctgttttcagccttgggcaacagctggtaccccaacctcctaagcatgctgagaccaaaacagtccctgggcatgaaaaggatgccaggctgcaggactgcagttggcttctccttcctgacccagggcagctctctcctttcatcctctcttccctgccactctgaggcaggttggttctcccacttcccttcctcagctcctctttcttcaacccctaccctttgcccctcctctctccctccccttgaagggtagcaaagcctattctggagccagatgatgggcatgaatttggctgtagctactaattgtgtcaccctgaacaaattaatttctctgtgacttagtttctgcatctgtaaaatgggaggaaaaaaggagctacctcacaaattgtgagggtagaatgagttagtaattgtagtgttttggacagtgccaggcaaagagacactactatatggatgtttgtataataaatgcctggatacatccaatctgatcaaaggcagagatgggaaatgagcttggggtatccaggatgtgtgggaactccaccccctctcataggttactgctataatctccttctggtctcaccagccccaggctgcttccttgtgatcgcttctctactctggctgctgggtcttctttctaaatcctgatgtgaccacataactcccctgctcaaatactgcagtggttccccattgcctgctggataaaggccaccttctggccccttaggatctcatcctcagaactctgcagccctatcttccccatctttctcctcccctggatctgagatccagacttgcttgaagatatgccctccagtctcaggcctccaggcctttgcacttgctctttcctccacccggtgtttcctcccatccctttcctcttgatgttggatgttgtccccttccctccccctactctactagggctgtagccagatgaaggcagtccccgagagagggaaagcggagagtaaggaagagacagcaactcagagctgcagctttctcagcttcaaaacgaagacaataagaaaaggggacccctcaagatcaaaggaggggatggaacaatatgtgagcactcaggaaactggaaatgagcgttagcatggagtgactgctaaagggttactggggggcccgcccaagtcccccagctcctttcttccaagtcccccacccacccccccgtcagacccaggccactggaggtgaacacaggagaaaaacgaagtggagagaatgggaagggggaggcgataaacaaaaaagaaggaagtgcagtccgaggggagatgagagacagaaagcatggggttggagccccgcgcctccgaggaaggagggagagggtgacctggggtgcgccccgcctcccctgcttccgcattcccgggggctgcccccccttcggccgcagctcaggcgggtgggggcggggcggggcggcgccgaggagaatgaataattgaagtggaggggaggaggaagaagaggagaaggaggaagaggagccgcccgcgcagggtcctccccacgccgcacccccctccgccgcccggaagtcgctccccgcctccctctccgccaacatggccgcgaagtcggatggagcggcggcctcggccagcccggacccggagggggctgccggtggagcccggggcagtgccggcgggcgcggggaggcggcggcggcggccgggcccccgggggtcgtcggggcgggcggcccggggccgcgctacgagctgcgggactgctgctgggtgctgtgcgcgctgctcgtgttcttctccgacggtgccacggacctgtggctggcggcctcctactacctgcagaatcaacacacctacttcagcctcaccttgctgttcgtgctcctgccctcgctggtcgtgcagttactgagcttccgctggttcgtctacgactactcggagcccgcagggtccccgggacccgccgtcagcaccaaggacagcgtagccggcggagccgccatcagcaccaaggacagcgccggcgccttccggaccaaagaaggcagccccgagccgggtccccagcctgcgccctcctcggccagcgcctaccgccgccgctgctgccgcctctgcatctggctgctgcagaccctcgtccacctcctgcagctcggccaggtctggaggtaggagaagcgcaggtggagggacctgagcccgaggagtgggggtggcgaagggctacctgacgtcccagccctgatctgacctttccgggctaccctcctgtcctgacctccccccctccccaccccattgcagctctaatttcttctcagtcggcttctccctgacctctgcccccaagccctgaccaaccccagtgccatccggtctgacctggccttcgagaggggaggggatggttcaagaaaggagagaaagagatcctcaggggtgtgcgtgagtggggaggacccggggctcatgaagataaatgtgaagcttaaaacaggaccacagggccctattctgccataacccactcctctctgcctgagtgccaagcctgggctcaggaaagatctcagaagtcctttcctgctcgcaaagatcctcagttcagaattgcagctcattcacaacctgcaaggagagtcacagaatttgagacagctaaatgaatatcccgcctaaacttcttggactttttggagaaagatatgctggacccaactggggagccctcaggctccttctacttcctatgaccccctctcccccagctaagggtcctccccttccaacagggccaaggggatttggaatcttgaatctgagattagatggccactggctgccctttaatcccgaactggtaaggcaaaactgaggctttgttcaagctgcccactttcagtcttcttcctctgccagaactgagggtgcctgctgcactgagttaagtggagagaggaggaattctaaacctagggctcctcttgaatctgaattgctatttagtagcttaggcccttctgtgctctaacagaatgaacttgcttactatatgatcttaggcaagccgccctcctccttccaagcctcagtttcctcttctgtgaaatgagggagaatccctactcctcttatctcattgtcttatcattgcattattcttacctgttgggatggtcaggtgagaggtctgcatgagggccctgcagactgtaacattttaagagtgtggggaaagcatggaaaaagtcactctagagatataaagggtgattactgctgttgttatatttattctgctacttgttaacacattctgcctaactcagaagattcagtttggggctgagggttgaaaacaggactcctagggtttgtcccagctgctcacttgctgtgtcactcttgttgtgttgtcgaatctctctgcctttgtttccctatctattcctgccaagatgatgtgtatattccacttagcttatcctggaggaaaagggggcggagctctatccacacaaggtggtgttattattattagcgtgacacataaaaatattcatgtctacatccaggaactaatctgcatttatcattctgtgcccgagtggacagatggtgaaagatatttttagattctgaaatggtaacttcctattcttggtaggaagcttcatcccccttttccttcagcctaaagtgggccagatgcccctcgactcactggctatccccccattcagaatccacttacaagaaactaatacttctcttctttgttaagcataaactgagtttccctcaaatagggcaaaaatggccatgggtgtggggtcccaggggagtagctagaattgctaaggatcccctcagctctatggtttcttggatatggataaaaggactagctatttctactatctcccatttgcaaaatgaggaggctgggatgagataagtttgtagggataacaatctaatagctcttaggttgaatgtggcttgtggaagtgttttgtgtggcttgcatagtattttaaaaacccagagtcgtagcttccctttaaaaaaattggatctagcagtatcaatcctgtaacaatttagaaagagtctatgtgctctaatttgtccatctttccctttgatcatatctgtactatttcacttagacatgaaagccctaatttacagttctataacaattattttattaaacactgactttgtgccaagcctactggttgcctttttacctgctttatttcctgtaccccttctaatcatcctgtcatgtggttagcattataatttctacttgacagatgagggaatggaggctcagagagggggcatccttgtccaaggtcacacagctaggaacttgaagagctgagactccaggctctctgcctttaaagcctgagttcaatttatccaccttgtaattctgccactaaagtgtccctcaagcttaaagaagtatgaatctgagattccaagattccagtatgatagaaagtcagggcttctgttgcactgagataagaatgtgaaaagaggggcagggagttgaactatgtgggtgaggacgggaacagtgtgtattgtggggaaaaggctggattcgggggtggtctggtcaggaggctgacatctttatcctagtttgtaactatagtttgctgggtgaccttgggcaaggctctttccatctttgggtctcggtttccctgtgtgtgaaatgagattcaatgtgatgaccttaagagtttcccattcctgaaattctgactctgggtctattgccaaagcaaaagcctctgggcccttgcccccaaaatctttggattctaaaatggctaagggcctggataaatggagggaaaacccagagaaggtatagagaagctgcaggggctggcattcctagaaattaagcaatgttggcccagcacatttgcttaccacgtgagatgttcccacagatgttctgagtggtggggcctggggtaatgaagagggagatgtgtgattgagtcctccagaatcacacctgggaggctaggcagtcactcacctcctgatcccatttcctcaattctgaataaaataattataatcatgaagatatttttcaacctcttagacttgtaaaatcctgaattaaaaattcaaatgctttgaggacccaggcaggtaacagaccataagaccataagatacaaggggtgtcagacaagaggacattcaggggcaagtagtgtccgaggaaaagggaagctccagctgatcatgccatgagaaatcgtggacccagtcttgatttctcaagagaaatgggaaattgggatttttccgtgaactctccaaaatttaactactaattaaaatgtttaaaaatagtgtcaaccaaaggaaacatatttattagcctgtcttctttgtaacctctggtttagctcttcaaattgataaggtcttttcacacagaagattttattactaatttaaacataaaatgaagctctgaagagagagaggaggagaaagcatacacagacactgcacacctaccgtgtccccacaggccctgtgtgagtgtttcaggcatgtgatctcatgttactctgaaaccctcccccctggtgactattgatatacccatttatcagataaggaaccttgtccaaaagtcacccactgaggaagtgaggaaaggtgatcagtcccaaacctagctctatcttttacaccacacactggctactttgggacatgccagaacaatatctttgtgcacagagagattgaactctgagggaacagcaaacagatcctctggcggggcacgaagctggctgtggcctggacaccaacctgcaacttcatccctcccttccctttaaactctctgagctgttaaactgcccagggttcttaagctaattaaagtcctaaccctgtcccctctgaccctgtaggcagcagagcagtaagccatgaatcctgcttttcctaatcttgagctcagtgggccccagcttcacccagataagcatggtttgctaagccaattagtgggagacgatctgacatgggattcctgccaggctttcgggatctgggaaccccaaaatggggagaaaattaggcaattgggatttaggggccctccctctaatgccctctctatgcataggcccagacactgcactctatgtcacctaagaagccctgcatgacagagaagttctggaatgagttagtgacctattggaaggaaatgtcaggctctggatttcccctctgggaaactacattcttggcataacggttgagagggttgagagcacggactctagattcaagtgtcctcagtttaaatccagactttactacttcttatatgtgaccttgacaaggcaaataatctctcatccgttgtaaactagggaccaaaattgtacccacccgcctcttaggttgtttcaaggtttaatgagataatgtgtaagggttcagcaaagggctcattccatcgttaaatgctcagaaactgctggcaatgattagtgcattagcttgggctttgctccctgtggaacaaagctttgttcacggagcacatggcaggacagcaagggggtcctgaagtcccttgaagccataatgacatggcagtcattcatttaatctgcagtcattcattcagcagacatttattaagcacctgctgtataccaggcactgttctaagtgctgggaatagagtggtgaacaagacaaagtccttgccctcttggagctcaatagcctaatgaaggaaccaataagaaaataaactatgatatatattatatgggatatataatacctgggccagatcgtgataagtgctatggggaaaaaaatgaaacagggcagggagctactggagtgccagggagaggtgtggctctttgagatagggtggtcagggtggacctctccaaggaggtggcatgtgggcaaagggctgcacgaggtgaggacaagctgtgtagaggtcttggggagggttttgcaggcaaaggaaaagggaagggcaaggagaaggcctgtgtggcagaaatagagtgaggggagcatgtttggagatgctggtggacagattggcaggggcgaggtcatgcagggcctcagaggccatggcaaggactagggcttttactcttcatgacacggggagcccaggataatttggccagagaaggaacatgatcttgacttgtgttttgcaatgtccactctggctgctgggtggggaatagactggaggggccgggcacagtggctcacgcttgtaatcccagcactttgggaggccgaggcaggcggatcacgaggtcaagagatcgagaccatcctggccaacatggtgaaagccggtctctactaaaaatacaaaaattagctgggcatggtggtgcgcacctgtaatcccagctactcgggaggcggaggcaggagaatcgcttgaacctggcaggtggaggttgcagtgagccgagagtgagccactgcactccagcctgggtgacagagcaagactccatctcaagagaaaaagcataaaaaagagagagaatagactggagggaggcagagtaagcctggagatgcatgaggaggctgctacaaagatgcaggagagagacaatggagactggatcaaactgtagcaacagggatgggggtctgcttcaggctgagctaatgcgacctctttccttctttggtcctcagtctctccactggggccagagttaatggttcagcatccactctctggaatcagccatatcctgcacctgccactttctgtgatttggggcaagtggcatgacttgtctgtgccttgattttctcatctgctaaatggacactctaataatagcacctatcgcatggtgcttgaggtagtagaaaattaaataatgtttagtgttcagcacagtgcctggaacataggaagttctcaacaatgataattagacattgttatttgtaaaacaggtcaggggttggattccatcattttcaaactgtgttttatagccctgtctccatcattttaacccaagtatctctgaatgtctcttttatgacatgtctaagattttgttttgaataatctgtcctacagctgacacttgattacagtcccctgaactcagtgaccatccatgaggttcctccctgctctgcctttgtagggttgttccagtttgggcctcaccactcacctcctgggagacccctctccaggaggctctccacccccaccctgcctcctccccttgcccatccagctgccatggaccattagagctgctcctaacagacacagcggcggcggttgggcccagcgtcccctgtttgatctataaagaccacacaggagaagctctggggagtgggagggcggagggctgccaggaaatggctttgaacccagcatctggggcgcaggtccctggggagaggagggaggatggttgggatcttctctggcctctctgttcaccaccctgcctttgttagggcatccaaattcctcccctgggaaatcctatcagcctccggttatcacccccaacccccaatcccgcctccacctgcaggcagagcgatggctcccctatgtccctagagcaagtccctgtgctttagcctggctttgaggccctttgccccctgatcttttgtctttcctccctgctctacccacatgacaacctgctccccacccccttgctctccattgcctgcagtccttcctccagcaacacccaacaccagtttccagtctcctcccagtgaaattctgcacgtccttccaggctgagctcaaatgccacctcttctaagaagctttctctgaacaaatcccacacatgctaccctctgccccccagaaaccacctcccactcactcaaccaggcaaaagtcattgttctaaagtggaaaatgtttggctgttttgtctgttgatcaaaaagctatacattcttgttgaaacctcaggcaatatagaaaaggcataaagagattcccctctgctcattatctcttggggcgggaggggtggggtcaggggagatttccacttattaagtagatatttcttgcattgcttgaagattttgcctctggttttcagttagctaaaaaaatgcatgtatagatttgtctattttttaaaaatcagtataaaaatgaaatttattatacttactgtttattaagacttagattcgatcatttctcttgacaatcctgccaggtagagactgcgaggatgaagaagagaactgtagacccaaaaccctggctctgccacatatgagctgtgtggctttgagcaagtcacttaacctttctggacctcagctttctcatctgtgaaatgggcatcataacaatccctacccaggtctccattgtgaaggctgattcaattaatatatatgtgctctgcacagtactcagcacatagtggtgctcagttagtgtttgctagcattattggccccattttacagatgtggaaattgaggcacagagaagagtggccttccaattcataaggagcaaagctagggtttgaagccatgaggtcaggctcccaaacccacatgtggaaccaccaaactatactgtcttctgctagttaagtgtattcttacaaacaatcaatcatgtattgtttagagaagcagaagaaaaaatatcagaaaagtatttttatttttttttattttttttgagacagagtctcgctctgtctcccaggctggagtgcagtggctcgatctcggctcactgcaacctctgcctccccggttcaagcgattctcctgcctcagcctcccgagtagctgggattacatgtgcccacccccacacccagctaatttttgtatttttagtagaaacggggtttcaccatattggccagactggtctcgaacttctgacctcaggcgatccacctgcctcggcctcccaaagtgctgggattacaggcgtgagccaccacaccaggccagaaaagtatttttaaatttgtattttaatgtaaagtccccactgttaacattctgggttcttcccctcagacttcctccccaggcacaattactcattcctttttaccccacagcactgatcacattttgttgtgatcatctacccacctggctggctttcccgctggatcacaaacccctggggagttgaggctttgttgctttttctttctgtctcccatggtgactagcacagattagatcctctgttactgttggtggtcttgcacccagccagctctagtgaggtctatggtgggttcttgcaacatgaagccagttgaagctggcatttggcagggtgctgaatgtgcgagctttctgcagttgtggacacagcactgaggtctgttaggcctacatccacagcctttaaaactgtccacggcctaaggctaaggaaagaggaggtagtaggaacaaccctgggttgggttcccagaatgatacagttgtggctgacttaggagatggaggaagtcaagttccttgtatgcagtaggtactcaataaatgttggtgtgaactggattgaacctttgagatcagaatcttggacaagtcacttcgcacctagggttcagttactccatctgtaaagtaacttcagaattctggtgagttttcctaggacttggacaagaaagcagagtagctgagagcttggggcaccagcgcagatcaaggagccatgacatcctagttgcgtgaccctggggaagttgctccaccagccacagctcctgtctcatctgtgaaatggggatagtgatagtatccacatcttaaggtttttataaggatgtcttgagataatgtaaatgcacagggcttgtcacatagtatatgcccagaaaacatctactacaatgactattattattggcccaagtcacagcccatcctacttgcttagtaacaagatggggttaggacaggggcataaggggtcctaactctcacccactgaccccctatcgaggaaggagagttgttctatggctccagagatactgtgagggcagatgcgaactcaaagtaaagggaggcacagtctttggaatagaagcaagaacacactgtcaatcaggctgttcccgagggtgtgaactccacatcagcagaggtgtccagatggaagtggctaactttggcagggatgctgtatcagggactcttgcttcagtctggaggataaactagatgatctctaaagccccttagttctgtgtctgtagctctatccttgggactttatgatactcgcttccatgatgtttaaccaccagaccacaggttgcaaatcagtggcctatgggcaaatccagcctcaagagtgttggtttggtccgcaaaggacttttttctcctactttttttttttattttttttgctttttgagatggtcacgctctgttgcctaggctgaagtgcagtggcacgatctcagttcactctagcctccgcctcccagactcaagcgatcctcctgcctcagcctcctgagtagctaggactacaggtacacaccaccatgcccagctaattttaagacaatttttttgtaggggcagggtctcactatattgcccaggctggtcttgaactcctgggctcaagtgttcctcctgccttggcctcccaaagtgctgggattgcaggcgtgagccactgtgctggttcttctcttactttttattaaaaccttttattgcagaaaaatttaaacacttgaaaaagttgaggaaatgggataatgatcccctaccacctctcttcaacaattattgattcctggccaaccttgttttatctagggcagcaccatccagtagaactttctgcagtcatgaaaatgtcctatatctgcactatccaatatagtagccactatagagcacttggcatgtggccggtatgactgaggaactaaattttaaactctttacttgtaattatttacttgtaattaatcaaaatctaaataatcatacatggcaagcattgaacatgtaggtgttagagagcatagttgcaggccccaccccatttccttcccttccgtgttattttcaagcaaatttcaaacatctctaaaaagatagacttcaaaaacatcgctaagttgctgggcatggtggctcatgcctgtaatcccagcactttgggaggccgaggtgggaagatcacttgaggtcaggagttcaagaccagcctggccaacatggtgaaaccctgtctctactaaaaatacaaaaattagctgggcatggtggcacacgcctgtagtcccagctactcaggaggctgaggcaggagaattgcttgaacctgggaggcggaggttgcagtgagctgagatcacaccactgtactccagcctgggcgacagagtgagactctgtctcaaaaaaaaaaaaaaattgttaaaatatgtaatactgctatcacacctacaaaatggaattatgatttctttttttcttttctttttcttttttttttaaagagaaggtttcactctgccacccaggcaagaatgcagtgccacagtcatggcttactgaagcctggaactcttgggctcaagagatcctcccaccttggcctcccaaagtgctgggatcacaggcataagccactacaccagcctaatttcttaaaaattcatatggtatttctttaatttattgtgaacatttccaaattgagattttccccttgtttttctttttgcataaatatcctaatatccacctattcttgaaaaattgaaactccagccatgttgggctcatattctcccagggcatcagttggctggaactgacaggtggctgcctctgtagacaggccacatagttccccagtccctcataatgatagcagctgagcccctttaagcattggcatttgagaccctggctaccatgtagaatctcacacccagactaggggcagatacaagtgatgttttctccctgccttggtcccgtgataccttcagatgccatcgggaggatggaatctaaccccctcccccactggcttatgacataccaaatccacatgaggatatcaagcaaagagagaaagggggaacaaaaggccttgggctagagtatggggtcctgggttttagtctcttctctgcacccatttcacagatggggaaactgaggtccagagaggagaggagagctggctgcattcatacagtgagggatgtgggaggccagaacctagtccccaaatgctttgctgaagaggggctgcccattcctctgctgtgcaaaagagggacgctggctgggagctgatgagggtgagtgggatgggagagggtctcagcttctcagttagggcctaaaattagtggctgggaaatgtttggctttagcccagaaaaaaaaaaaaaaaaaaaagaggtgctgtgactctgtagggggctgctaaggaggagggagacagcccagctccagctcccagcaccacatgaaatgggagccaaacgtgtaaaatcacattctttactgacatttatgactcatttggctgacaaccccaggaaggtcctattttgtattcttgcaggagcactcaacgttaaggggtaggcagatggggagggggcctcagggccatccccccaaccccccgcaaaagtttctgggcttcattgcaggtgaggaggctatatagctgggaacccaatgtttcctagagaacccatagaccagatttgggttcccatgccccacggtgaaatgggggagttggccagccctggtttgggatgcaactctgatgctttctggccatgtgaccttgggcaagtcatttctctaatggctctagactctattcccctgtgtccgggccatccttacctctcacctggcaactggtctcctgtctttcactcttgccctcctgcaatctgttccccacagccaggatgcttcctctgacatgcagaagtggtatctaatcttgtcactttcctgtttaaaaccttcctgtggctctccatcactcttaagataaagaccaggccgggcatgatggttcacacctgtaatcccagcactttgggaggccaaggcaggagaattgcctgagctcaggagttcgagaccagcctgggcaacgtagagagaccttatctctactaaaaatttaaaaaaatatatcctggcatggtggtatatgcctatgttcccagctactcagggggctgaggtgggaggattgcttgagcccaggaggtcgaggccgcaatgagctgtgctctcatcactgcactccagcctgggtaacagagtgagaccctgtctcaaaaaaaaaaaaaaaaaatggccaggtgctgtggctcatgcctgtaatcctagcactttgggaggcacagggaggtgatcacttgaggtcaggagtttgagaatagccccatcaacatggtgaaaccctgtctctacaaaaaaaaaaaaaatacaaaaatcagctgggtgcagttgcccacgcctgaagtcccagctacttgggatgcccctgaggcagaagaatcacttgaacccagagggcaggggttgcggcgagctgagatggcgccactgcactccagcttgggcaacagagcaagaccctgtctcaaaaacaacaacaacaataaaaaagataaagaccagccagtcacagtggctcacgcctgtaatcccagccctttgggaggctgagatgggtggatcacctgaggtcaggattttgagatcagcctggccaacatggcaaaaccccgtctctactaaaaatacaaaaattagccaggtgtggtggcatgtatctgtaatcccagctactcgggaggctgaggcaggagaatcgcctgaacctgggaggtagaggttgcagtgagccgaaatcgtgccactgcactgcagcctgggcaacagagtgagactctgtctaaaaacaaacaaaccaacaaacaaacaaagaaaaaacaaaagataaaggccaaataccatggttcacgtctccacttcgtgtcgtgctttcttccctttcttctccctccttctctgacggcagccattctgaccacttactgctccctcccacttcaggacttttgcctatgttgtttcctcagccagaggctaccttccctgcctcctttacctggttaactcctatgtctgcttcagatcgtggctcagtagtcacctcctctagaaagccttccctgactgccacacccttcccaagctgggcctggctgtcctccaatagcactgccatccacagtgctgaagcagggacctctgtttggagcatttctggagcccatggaacatgcttgttgttacatgtttacttgatgatttagttaatcttcaggtccccattaaactgagttccaccagtgggttgggtctgtcttgcacaccattgtgtccacgagccattttagcacagtttggggtacatagaaggtactcaaaagtgcttggtggactgggcatggtggctcatgcatgtaatcccagtagtttgggaggctgaggtgggtggatcacctgaggtcaggagttcgagaccagcctggctgacatggcgaaaccctgtctctactaaaaatacacaaatcagctggggtgtggtggcgcatgcctgtaatcccagctactcgggaggctgaggcaagagaatcacttgaatccaggaggtggaggttgcagtgagctgagatcgagccactacactccagcccaggcgacagagagactctgtctcaaaaaaaaaaaaaaaaaaggcttggtgaataaatgtcaaatgaaccttcccttttctgacactaagtttcctcatctggaaaatggagattatgtccatgaacctcacaggaccacagtgaagattttagcgaagtacatataaaaggtatttgatgagtggtagttattttctggggggcaggcagagaccccaaagaatacttgccctgtgaacctgtcccaaaggtgctttctgacccagtgtccctcggggacaggttcaacgagcaccaggggaaagccagcctagaagtgggtctcagctgtgccagaaaccaaacttccttcttactgatggggcctctgattcaaaaagctccttgaaaccttccattgatcaagtgcccaacactgagctgggcgttttacacacattactactttctgatttcacagccaccctgtaaatgggtattgggctgatgggtccagagacgggaggcaacttgtctggggctacatagtcagtaagagatggagctaggatctgagcccaggcctgactctttcacctgggttctttccctctgttcttggccacttttacttaagaagtttacaaagcagagtttataaagtataatcactctcttcattcattcactcactcaacaaatgactgtacattaacgatgtgccaggcactgggcatgtagcagaggacaccataaacatggtccccactctcatggagcctgcagtgctaggggaaagacaggcaataaatatgtaaacaagtaaatgagatggtttcaggttgtgatgtgtgttacttaaaaaaacagggtaacatgacagaaagtgaccagagaggctgcagaagtgctttgcggggttacaggcagtggtgagggggatggctgggaaagctctctgaagaggtgacattgagctgagatgggagaatgagagtttgacaggcgttagtgaggacctttctaggcagaggccctggggttggagtgagcttggtgtgttcaggaagcaggagctggagcatgggagagagggagggtggtgggagagggtccccgggagggacaaaggttgtgtcctcctggacctcaagggtcatggtgaagagttaattttaaaagtagtgggggccgggcacggtggcttatgcctgtaatcctagcagtttgggaggccgaggcaggcggatcacctgaggtcaggagttcgagaccatcctggccaatagggcaaaaccctgtctctactaaaaatacaaaaattagccaggcatggtggcaggcacttgtaatcccagctacttggaaggctgaggcagggagaattgcttgaacccaggaggcagaggttgcagtgagccaagatcgtgctattgcactccagcctgggtgacagagcaagactctgtctcaataaataaataaataaataaataaataaatagcggggagtggacaggcacagtggttcactcccagcacttgggaggccgagtcaagtggatcccttgaggtcaagagtttgagaccagcctgaccaacatggtgaaaccctgtctctactaaaaaacaaaaattagccaggcgtggtggcgcacacccgtaatcccatctacttgggaggctgaggcacgaaaatcacctgaacccgggacgtggaggttgcagtgagccaagatcatgccactgcattccagcctgggtgacaagagtgagactccatttcaaaaaaaaaaacaagtagtggggagtggcctgcccttacctaggagtttacaagatccccctgctgttgtgtgaagacaaggcttgaagagggcaaggatggaagcaagcaccccagggaagctgccggaatgaggtggcttggaccagggtgttgacaccagggtagagagaaggacttgggttcaggacatagctgtggaacattaatgttatcagagttggatgggtggggaggggcttgatgaacatcccttggtgtagacaagaatcagttacttgggcttgggcccattttatagaagaagattgaggcccatcgaggagctgggctttcctggaatcaccttggtctcctgactcttcacttactattgttgcctgtctcccagttttctctaaacccatataatcccaagtgaaacctgaggtccattgtgtcttaccggggtcctatcaggatcctgctgggcagccgtactgcacaccttccaggcgagggaagctgccacgtaggcagccgaggcaacaggggaatcccgtgggatgagacttgtccttcctcatccctgctctggctcaggaggccatgaagagccagggctgagtcctagatctggcactaacttgctgtgtgacttgggacgagtcctggtccctttctaggtctgtttctcatctgtgaaataaggataatggtagtccctgcttcgaagatttgttaagagggatggatacgttcatatgtataaaaagtctcagcacagcctgtcatccagctgggactcagtaagtgtgagctgttatccttattagtaaccactgcacactgtccccctgcagacctacagactaactatgggctcagctggggggatgtcctacccctgcccatcagtcctggctctcccatctgcctcccagccccaccctgttcactctgtagggatctgcagaccctggcccgcattgagactagggagctagccagcatgagggtggttcctggatggagaggcagcgggggagccactggaagctgctgtgtgtttggcccagaactgtgagggggagtggggaggggcgagaacacacactcggaaatgctgagaccgacagatggaggagctgaggatgtgagagacacagacagacagagagagacccagagtcagggagaggaggagcaggcaggggaggatggccagaaaactggcagtcacaccaagccacgagctgagcaacaaatcagcagatggaccaagcagtcgagggactaaaagacacagacagacagaccaccaagtggacctagcatccaagacacagacagaccaccgaacagatccagtatccaaagcacagacagacagaccaccaagcagacccagcatccaagacacagacagaccaccaagtggacccagcatccaagacacagacagacagactaccaagcagacccagcatccaagacacagacagacaggcagactaccaagcagacccagcatccaagacacagacagacagacagacagacagacagactaccaagcagacccagcatccaaaacacagacagaccaccaagcggacccagcatccagacacagacagacagacagacagacagactaccaagcagacccagcatccaaaacacagacagaccaccaagcggacccagcatccagacacagacagacagacagacagacagactaccaagcagacccagcatccaagacacagacagacagacagacagactaccaagcagacccagcatccaagacacagacagacagaccaccaagcagaccaagcatccaagacacagacagaccaccaaacagatccagcatccaaggcacagacagacagacagacagaccaccaagcacacccagcatccaagacacagacagacagacagaccactaaacagatccagtatccaaggcacagacagacagaccaccaagcagacccagcatccaagacacagacagacagaccaccaagcagacccagcatctgagacacagacagacagaccaccaaacagatccaacatccaagacacagacagacagaccaccaagcagaccaagcatccaagacacagacagaccaccaaacagatccagcatccaaggcacagacagacagacagaccaccaagcacacccagcatccaagacacagacagacagacagaccactaaacagatccagtatccaaggcacagacagacagaccaccaagcagacccagcatccaagacacagacagacagaccaccaagcagacccagcatctgagacacagacagacagaccaccaaacagatccaacatccaagacacagacagacagaccaccaaacagaccaagcatccaagacacagacagacagaccaccaaacggatccagtatccaaggcacagacagaccaccaagtagacccagcatccaagacacagacagaccaccaagcagacccagcatccaagacacagacagacagacagacagagagacaaccaagcagacccagcatccaagacacagacagacagaccaccaaacagatccagtatccaagacacagacagacagacagacagaccaccaagccgacccagcatccaagacacagacaaacagacgaccaagcagacccagcatccaaggcacagcagacagacagaccgctaaacagatccagtatccaaggcacagacagacagaccaccaagcagacccagcatccaagacacagacagacagaccaccaaacagatccagtatccaaggcacagacagaccaccaagtagacccagcatccaagacacagacagacagaccaccaaacagacccagcatccaagacacagacaacagacctcaaagcgggcccagtatcaagacacagacacacagacctccaagaggacccagtattaagacacagacagacaaacagaccaccaagcagacccagcatccaagacacagacagacagaccaccaaacagatccagtatccaaggcacagacagaccaccaagcagacccagcatccaagacacagacagacagaccaccaagcagacccagtatccaaggcacagacagaccaccaagtagacccagcatccaagacacagacagacagaccaccaagcagacccagtatccaaggcacagacagtccaccaagtagacccagcatccaagacacagacagacagaccaccaaacagacccagcatccaagacacagacagacagaccacaaagcggccccagtatcaagacacagacacacagacctccaagaggacccagtattaagacacagacagacagacagaccaccaaacagatccagcattcaagacacagagagacagatcaccaagtggacccagtatcaagacagacagaaaagcagacctcgtattcacaggatagacaggctgtctggcatccaggggacagagactgaagctcctggcctctaagggcaggcagacaggctgacccaggatcacagggtcagaccaataggacatagtatctgagagactatgtgacccacagtccaagggacaggattccaggattttggaactgagccagggactgagccaggattccagggcgagactgactgactaacagactcctgacagaaatgcaggaatggtaaataggctagccctgcattcaagggacagacacaatagacaggctgatctgagccacagacagagacaatgactcaggatctgaggtcaaagggatgggtccaggcttgggcccaggtttgactgtctgaatggactgaggtgcaggccagaaactctgacctagaaccagagacttggggtgactcaggaacgaagaacaggagagagatggggtgatgcagacgttgccagaagcttcctggcttctcaagaacatgggatcccctcgtccttttcccctcctgcccattagagagcagcccccaaactctgggggactgggggacactggaaatttcccgtgaggagggtaggatgggcctggggagaagggaatgagctcctattcatttctcgatcctgccacctgttcacagaggcagtggggttcagaagagacaggtttttgggtccctgacaggagggatttcatactctagcttctactcttctctctaggtgtggcctttttgctcccacttgtacacttttgagatgtacactcatctgctcttccagtttcttcccggacaagcttcttctctgagcacaagactgggggtcagtaagttagattccaaatagactgagggcctctgtttcctcatctatgaaatggggacagcagaagttgcgtgttaggttaacagcatggactacagtgtctggctcacttcaggcttcacgcagttcaagcctgagagctgttagagaaagtgaggcctaactgggctagaggggcatcagagagggcttcctgtaggaagaaggtcaagaatgagtcagcgagggcaggaggagcctgtgaggtgtcctggctctttgcaacttcaagcagagaaaccccagagccctgtaaggtcaggagggagatgcacacagatactcacatgtattcattcagcaaatagtcagtgcctactcaataatgcatcagtgcctattctacaggcactgatgctggggacacaggggtgatcaagacagacgagatccctgccctcatggattcacagtgggagaatggaaaataaataaataaacggtgatttcatagtgtaggttaagatgaaaataagacagggggtgtggtagactagagtgagttggcaagggtggcctgggaggcctctctgagaaggtgtgagctgatgaggagccagccatgggaggatctgggaaaggggtattccaggcagagcaagtgcagacgtcctgagccagggacaagtctggctgagttttaggacaccccccccccagcgcatctggagtgtcaggaacaagtgggacagtggtttgagatgaggtgagagaaacaggcagggccagatggtttagggcctgcacgccgaggggagaagcgtgggttttattccaagtgtgatgggaggcccttggaaggctttgagaaggggaatgacatgatctgacaggttttaaaaatatcctgctggttgccatgtggagaatggactgtagggaggcaggagtggatgcgggcagccacacagaaggctgacgtggtcacccaggcaagatgactgtggcctgcacaggtggtagcagaggagacatggacagactggggattttgttgttttttagtgatggactctcaccctgtcacccaggctggagtgcagtggtgcagtcatggctgactgcagcctcgaactcctggactcaagtgatcttcccacctcagcctcctgagtagctgggactacaggcacacgccaccacatcggccaatttttaaatgttttgtagagatggggtttctctgtgatgcccaggctggtcttgaactcctgggctcaagtgatcctcccgccttggcctcccaaaatgttgggattccaggcatgagccgccacacctggcctggggataattttggagaagatcagatgtacaccacccccaatctggattcccttccctgaggtgtggtgttcttcccttgggtgaagatcagcttctttcaacttcatttcaaatagagtgggatgtgggatagggtggacttcctagaggaggtttcaagagaggttgcctggtggtgaggaggagccagcggcccctgcccagtgtatgctactccctctatggacaccctttatagtttataaactatttttaaattcattgcgtgtgtgtgtgtgtgtgtgtgtgtgtgtgtgtgtggaaacagggactcactgtgttgcccagactggtctcaaactccccggttcaagagatccacctacctcggcctcccaaagtgttgggattacaggtgtgagccactgcaccctgccccatcacactcatttaatgctcacaacaaggaggaaaataaagctcagagaagtggagagactacccaaggtcacacagcaggtctgggacagggctgggaatcaaacccacatgccagccattgctacctttcctccctcatccttaccccagtggctatgtgtaagcagaatggcaagtgccattcccattttagagaagggaaactgagggccagggaaattaggttgcatgtcctgggcaggactgttttaagacctttgtgggcaccacatctatcaagcatattaaaatgcagctacatcaaacatcccatgtaaattatatatgactagataaaagccaaattgtagttgactggctgacatcatgttctgttttgcacacatttaattaaacatttattaattttgattctgtagtttttccctgtgttttggagccaatttttttttttcaggcttcaaacatttccctaggcccatgaaaatctcacaggcccttggcagagagcttttcgtgctggctggaaggaacagccacagttttgctcctgttgccaaaaggggcagagcgaggcagaacccaggccttttatccccagaccacagtgtggtctttccacactccccactgaccccacattcctggtactcagagccctcctctcttctcttcctccatccctgctcctgcccactgtggccctgggctgtgtgagccctttgtctgtggttagctaggagctggcagaggagggggcaggagtgggcagggaggtgggcaggtggcccgtcaggtagtgatggatgctggccaggggccagggcctctctcatgctgacccgggcccggaaacagatggtcttccagcctgagagaaacttccagggtgtcaccttcccccaactccccaggccccttcacattggaccagctggtctctccttcctagtcaaagccagagccatgggaaggggaagggaatgtggcggcagtggggatggaggctaggaaagacggcctgtgttctaggccctcagaagttctaagggccatcttggtttctcccccagcccccacctctggccatctccagatctctctctgcccttcctgtatcccatgccttagctcagccctgtaatttcagacctggaccaaaccccatcctctcctggctttcctccaagccagcctccacagcaagctttctaagccactgagccaagctcatcacccctgattctgggatggcattcagatagagaataaaatctgaactcttcagtccagaatttcatgcccttcacaattctagtctccttatgtccctgcccattaaaaccccttgtccaggcccagcaaacctctggccattcccctaaaatgccaaattctttcaggcctctgagcctttgcttcagctgattctcccacctggaatgaccttccatctcttgtgtgccttcagatgccaacccatgctttaaaactgagatcaggccaggcgtggtggcccacacctgttatcccagcactttgggaggctgaggcgggtggatcacctaaggtcaggagtttgagacaagcctgaccaacatggagaaaccccgtctctactaaaaatacaaaattagccaggcatgatggcgtatgcctgtaatcccagctactcgggaggctgaggcaggagaatcgcttgaactctggaagcggaggttgtggtgagccgagatcacaccactgcactccagcctgggcaacaagagcgaaactctgtctcaaaacaaaacaaaacaaaacaaaaacaaaaacaaacaaaaaaactgagatcaaatgtttcttccttccaaggcatcttatagcattatttcacttcctatcttgtctctcttccatgggactgggagatacatatgggcacacagcctggcacagagcaggtggtcagaatccacctgctacatgaatgaatcattctggctgcagggatccttatgtgtggggtaagcaggagtccagaaaatggaagatacagggagacaaatttctgcttatcagaagaaatacaatccagacctggagctgctcagaagctgaggtccctgtcctggggagcgtgtgagcagtgagtgtagatgcagcaggctgaggtccctgtcctgggcagcgtgtgagcagtgggtatagatacaccaggctggaaatgactgaaggaattccagcatggcacaggagagttggacagagggggctttgcatttccagagtcagcttctgagggaacagcccccttacccatcctggctgccaatcctgtcatgtgttatgttgatggtgtgtttatgccatagactgatgccaggatgacccagggatggggaggagggtcctaaatgggatgttcctggcctcattttgcagagagagtcccagaatattcactctgaaaggatctccagagtcatcaaactcatccctttcattggcagatggagaaactgaggctttgagagggccacacagctggtaagaccagtatactcatttgaggaaatttggtatcagctggccccacatccagggagaactgtgacttcctcccttgggctgtgaatagagtgagtcccctggttcccaaacaacatcctggaaatgccagcgcttcaccctgggaatagaccccaaatctctggctccccagtttcagatccaggcagcggggtcagagaatctgtgtaagggttccccctccacacacacacacacacacacacacacatacacatacacacacacaccacccccagtttcctgggaaagccacttttggaagagtcctctggtttgcagcaaagagtgtgcctgccccgtgaatcagagagtttggggagccggcgggagtagggggcgctgggaaggtggcagggtctgtagctgcaggagtagagcttctgggcaaggaaccagggcagaagggaaatcagacccagagatctgtgtggagagttcccctctcaccctacatgggcactgtacttcatagtgtgcaaagtttcttttcattcatttaatcctcaccgccactttgggagggattaactagggctcagagagggtcttgctcaagatcacacagtaaattagaagcaaagtgggattgatctcaggacttcagagtcccttctataccccctatagggttactagagttccattcagttcaacaagcctgcagtcgtgtttcattcattcagcccatatagattaagcacactttcattcattcagcccatatagattaagcacctactgtgtgctaagaactgaggatgcagcacttagcaagccagcctagtcattctccaggtactcacagcatgggggagatgtgcacataaccaggcagttacaacccactgtgacaagtgctagctagattagacggaagcctgggagaggcccttaccctaggtggaaggtggtcagcggaagctttatggacaaaattgtgttcaaaagctgagccttggaagaaaagcaagagtcatcccgggttggggccgggatggggttaggggatagggcagggtgttttagggagaggaaacaataggtacaattcctcagcaaggagggagaacattgtgagctctggctctgtgacctgtgcagagtggccaagaagagccggagtttgttgggagaagtggcatgagaggaagcagcagtttcagatgccaaggaaaagtgtctgtgagcaccttccttgcaccctggggtgagagctgggcactgagctgtgaggatctcacctcatctgggcactgagaagggaacaggccagggagctgctggtggcaacagaaccggggctggcaccaggcagtagggactgttcctggaaggaacctatgtgagcaaaactttttatggtttacagtcagaggcagtgttgtctaatggttagagtgccggccctgaggccagaatggctgggtttgtgtcctggttctactgcttcctagctgtgtgaccttggataaatgacatatctctctgggtctcagtttgctcacctacaaaatgggaattgggccgtgtgcggtggctcatgcttgtattcctagcaccctgggaggccaaagcaggatgatcacttgagatgaggccaggagttcaagaccagcctgggcaacatagccagaaaaaaatttaaaaattagcctggtgtagtggtacatgcctgcagtcccagctacttaggaggctgagtcgggaagattccttgagcccaggagtttgaagttgctgtgagctaagatcgcaccactgcactccagcctgggtgacagaatgagaccccatctctaaaataaaacaaagtaagggtcgggtaacagggctattgtaagctcagcgcactccaaggtgtcagtaaccctccaaagaaagcacgccccaaccgttataggaataagggcgataccgctgttgtattaaaggctttatttacttagtgccagtcctctctctaagctaatgagtccattcagtgctcctcaacagcagcctcataaggtgatcctttcgaaatgcccatttcacagctgaggaaacaggctcagcgtagggagtgacttgccccctgcgcctgtgggcggctcggggctggtgcgacagagcgagaggaaccagcgcgcgggagcctgagcaccgcgtccttcccgcaggtacctgcgcgccctgtacctggggctgcagagccgctggcgcggggagcggctgcggcgccacttctactggcagatgctgttcgagagcgccgacgtgagcatgctgcgcttgctggagaccttcctgcgcagcgcgccgcagctagtgctgcagctcagcctgctggtgcaccgcggtggcgcgcccgacctgctgccgggtgagcccgccccttcaccctctgcgcctgggaccaccccaccgggcctttctccctgcttcaggctccctggggatgccctgtgggcttccccaccccagctcagggctcactcagtcagggtttagggaggcctgccccttctaccctcaccaccctccaggcctctcgagacccccgcgtccccttcgatggcccacttatactcagagtgaggagggacctggcccctccactccctcgacacccatcagcccccctgggcgctcctgccctcctcccttccccgttgccagagccaaccaaaccccatctcccacccaaacaccttagaccctctggggaatcccctgcccacttccttccccaacctgatcccagcctgcatctcctggggaccccctgcctcatagacctggccaatcaccatcagtttccagagagcctaccccttcactggggggccccggggggccctcccaggcctagtcctggcacccatcccctcctcctccctacaggccctgttaatttcccaccttgccccttccataatgacagagcccctcaatatcagagaaaaaccgcatccccctgtctccctgaagcactccgtgctctcccaacctagtccctgcccaacccatcctcagtgtcccaaaagactatcaccacccctcatggccctggggaccccttgcccagttacggggtcccaatcacaacgcttcccaccttgggtctccccatccccgcccctcagctctgctcagctcagctctagatattcctctccatgcccggcctcctcctggtggcccacgacttctaatggccccctcctggcagctccacaccctaatcatgacctcctcttcacctcctcttccactcccagagtcccggaccctcatttcccaccctcccaccaagacccctgaatcctaacagccccacaccagagtcctagatggaggccaaacccccatcttcgtctccctttatgctcccaccctacagaagtacccagtcccgtgcaccctcaccacacctcttcatggctcttgaagctccccacctcccagaccttccccacacccctgctgatccacagctcctttcctcacgcctcttcaaaacccagctcctgacccagaaccctccgcctctccccagaccccaacccgagcccgcccctaacccagcccaccccgcccctgccctgtctccacagccctctccacctccgcctccctcgtgtctctggcctggacgctggcctcctaccagaaggtgctgcgggactcgcgggacgacaagcggccgctgtcctacaagggcgccgtggcacaggtgctgtggcacctgttcagcattgccgcccgcggcctggccttcgcgctcttcgccagcgtctacaagctctattttggcatcttcatcgtggcccactggtgcgtcatgaccttctgggtcatccaaggggagacggacttctgcatgtccaagtgggaggagatcatctacaacatggtcgtgggcatcatctacatcttctgctggttcaacgtcaaggagggccgcagccgccgccgcatgaccctctaccactgcatcgtcctgctggagaacgccgcgctcaccggcttctggtactccagccgcaacttctcaaccgacttctactcgctcatcatggtctgcgtagtggcctccagctttgcgctgggcatattcttcatgtgtgtctactactgtctcctgcaccccaatgggcccatgctgggtccccaggcacctggttgcatcttccgtaaggcctcagagccctgtggcccacccgctgacgccatcacgagtccccccaggtccctgccaaggactacaggtgctgagcgggatggggcctcggcgggagagcgtgcagggacccccaccccacctgtcttccaggtgcggcctggcttgcctcccacaccagtggcccgcaccttgcggacagaggggcctgtcatccggattgacttgcctcgcaagaagtacccggcctgggatgctcattttattgaccgccggctccggaagaccatcctggcactggagtactcctcacctgccacgccccggttgcagtaccggagtgtggggacttcccaggagctgctggagtatgagaccacagtgtaggctacagtgtcccagcacaaaagggacaggcttggctgatcccacatccgccgcagtgttgtgccccgaatttcagggccaccaggctaagggggagtggatctgttggtccaagggtagagtggccccactcttgggttctttcaggggagggggcagccttgcggaggccccagccctgggccccgttttcagccttgtggcccattccctaaattcccctgacccagggcctggggaatcatctggtgctacacttttcgagctgccctgctttcatggggcctccacacctctcccctgcctggcgttgcccatgtgttgcccctgctggacttgccagagaaagggcactgtctggggtccatgacctagaccctgtgctcctcaggggttgtggagagtgggctgcctctatggtgggaaaagatctctgagaaggatggaggtggccgtggaagggatggggtgaggttggagcattgtgtggacagggatggcgtggctcctgtagcatctgaggcctggagccagggcaagagggagctgaagaagggagttggggtggggcagggtgttggggtggggggctggcagtgctggagatggataggagaaagaactggggggggggtctaggctggcagaagcatggaggggtggaagacttgggggaggggaacctgcaatccagagcatagcgaacaagaatgaactccttaggagacgtctcttgttgtgttgtgggctctgtgaaggatgaagttccacacacctcaggtgaaatgtttgaaggagccattttttgttctagatgtgcacctggaacgtggcttctagatacaggtcttcaacacagcagataagatgtctggaaagatctctgggctcaagtgcaggtgaggttttagcacagttatcagaggaactgatccagaagcaggcttagttctagattgagttctagagtgctaggctgataaaatgtcccagggagccactctgatctgtgtattctgttgtgaggaggaggacactggaggcctgctgctctgctgtgggggattctagcacctgtcacagtggtgggggagaagaggttctagagcccagcgtgaatggaattttctaggaatgggtgctctcattctagacttctggggctcatgggagctctaggcccctgttaccttggtccatagccatctttctaaaaggaaattgtcctcagaacccctgagacatttcagctgccaactggttcccagctggaaaaaaaaatagctctggggacgtgacatgaatcctggctctcagccactctgcaaatggggctccctggagcggcatctgggaaactgacttgttttgccttagatctgatgactccccaggacctgtggtctattcccatggcctgaacatcctggagtgcccaggggactcacccagggcccctcctcccacctaggacagccagtgctggattgagggggcgtatgggagaggggaagtaggcagttccatggggtgaggagacagagcctctagcagagctgggaacccaacccaccccccacccccccacacacacactcccacagcaacttaggtgtgattggtgggagaggacagcagcggatgttaaggacagatgccaacctgatcctggagtgaggtgggccatgagaatcctagactatgcaaattagagggatgcttagccctccctggttcagcctctcttgggttacagatgggaaactgaggcccagagtggcagccactctctcaaggtcccagactctgggctgcccatcaaaaggtgatgggtaatgatgaattgctggggatgcagggtaaccccaaaggcagggagggccagactgcccacatacacacaagcacaagcacaaccatgatacgggtcaccctccccaccagcacacaggccgagatggtgtacgcatcatccctcctgccaacacagcaagagtgcttttccttctttctgctgctaagcaccctcaggaacgaggcctcgagggtgacgggaggtgggagaagcccaaggctgacccaggcccactctgttgggttcatccatcctccaaatccatctttggaggctgaattcacacacaaagccgttgtgagatgggagctctgaagatgcggacccagacccagaaacagactgtttctccagggccaactttgtgccaggaattttcaccccatgtcgtttcacttacactctcctctggtcacgacgtccctgcaagagaggtattatcaacccatcttacagacgaggaaactgaggcccagagatgtagcatgagggtcacccttggcaagttattctcctccccagtatcccagaatggcccatctggctgctgccttctagaggaaaagtcctagctggggtcctttacactccaggagactcccaaggggcagggatgtgctggcagggcttggcatggtctgaggctcgcagggaagccatggctacatttttggattttactccacccccactccccacctcttctcaaccccacacacccttccctcagggcttctgcctgcagggacatctgggcacaggaatggccacagtcaaagggcccagggagagggctgcaggcacctcctcctgcttctcaccctcagaagagtctcagcccttaaaggactctccacccaggagctcgggaccaggcctgaggccccctgctccactggcttgtcccttcatttcactgggatagaggagtcagatgagggaggggtccatccccttggagctgttttgtttttctttctgtgacacaatctacctcagccagtctctcccctagcagaactgacccccctggtcctctgcctcctgtcccctgacccccaccccagtctggatgttcagtccttccctgtccttcccaccctgccagggtccttgcagcccagagggtccctgagggttccttaagccacctgccctccacatccattagacaggagaaagtgagacccagagaggaccaaggactcaccaaaggccacacaggaagtcagtggcagttaggatttccctggggatgagaggtagttgggtgtgtcttaattttgccaggaacagaagagaacaggatgctttgggtaccaaatatggcaggccctgccctcagttacctctaaccccaggagaccagtgtccccatctccagggcagacttctgtctacctgttttcttagaactgacccccacgctgttgactgtgttccccaaacctctgcaggcaccacacacacccacatcacggcgcctcctggcactgatgtgccatgtgccttgtaactgtcaccccagctgaacagcacagacctccccactcccccacacagggctccccaatgagggagccttgcttgatcccctcctgtcatctgcctcattcttgtgtctcccccaaatctgccttacccccagccagctccctgctacacctgtgtcccacagaggcatgtcacccatgagagtcgggaaagacagagggcagggaaggtgaggcctggggaaagtccaggcctctggataagggctgagggagctgggaatatccagggaaggtctcgcttgcagtcaacaccctcctaagtactcgagttctgcaggttcttcccttggaattaatctggacctggagtccacagaagcctcagacaatagggagaaggttttctgggacgaaggctgcatgggatgcaaactcaaatgcctcgagataatgaaactaagagtaatggagacaatagggagtgttggggactctggcagacaggagagtgagtgtgtgccctgcctgtaggtactaaaattcaaatgtttgggaaactgctggccactcatatttggcccacgtgccaccagtttgagacttacggttcaaaatgttgagaaggttctggagtgtcctgccaagtggaaacccctcagcggaagtcagggacagaggctgtggctccctctgagactttgctagtccaaccctaaatccccatcacctggctatctgagaactgagcccactgccctctcagctgaaaagggaaatctggggggtccacagggtccctggtttgggaatcatctgataagggctacaggcccctccagtgcctcatggggttagaggctgctggagtcttctccagcttgggggcccctggttaggaggaatctacattgggttgcaggggagtccaggtgcaggatgtggactgaaagccaggacccaagagtcccattctgtgctggcccctgccacctttggcacctgtctccctcccagttcaagctgtggtggggcctgcagtagaggttggtagggggagctgtagtttctatattaaagtgctttgcagtgtctcaatggaagggaacaagtgggtgtcaagccgcatgggcagtagtagggttggggtttgagcccccttcccaaccatagaggcttctgagacctggggctggggaggaaaggagcttcaatgtgccattctggttggggagaggataggacatttctgggtccttggctgctgccggtagaggtatggggaggaaaaactctagagtgggagatgtggaagtggaaaaggaaggccctgtccaggcctggcctggtttctggagacagaaaactccccaggggacagagaggttacccccttgtgcttagcttctgccacccttcccttctctggaggagaaggctgccctctcctcagcaaccctggcctttattctatgcataaccactgcaagggcacccctggccaggctgaatgggtgggggtcccagggcacctgcaataatctcagaatggagggtatcctgggacaaagagggggtacagaaggtgccaggggggaaaaggtgattcctccatctctctctcacccaaatccccccagatcgaatctgacccttttccctggtctccattgtgctaaaccaccgaacttggaggagcctcatataaacatagcccccagccccactggctttccgaacccatcatgaaatagctggaaggtatctgaaccgttcccatagctccctcattattttcttccctgaggatcctgtggtttaggagatttttctcccaaaccagcctcatttcttgaagaagaattcattttcccatattaaattaactcaagctgagcttctgattgcagataaatgtttctaaggcctcaagtcaacttctagggcttgaaggtgggggaatatatgtattttattgagttgcttaatacaaaattctcaaaagcacttgtgggcactcattcctgccttcacaggccctcagggtctgggaccccacgttgggaatcaatggtttagacatccagcatcctattttactgaaggggcaagcccagagatgggagatggccagcccaaggtcacacagcaagttggtggcagggtgagaccagaacccggttcttttgagggtcccaccagaatatccccagccctgatcctcccctccatgcccctggaactctaggaatcactagccatgcctgaggggctaatctccctctgtcagcacaattccgagtgattcttcccctccctgtcgtctcttcctccctaacgggccctcacccctgtcctcttctgtttccttttcctggtcccacctcctggtatttactacatctgtgccatccctcatccccctgacccccattcaccctccgagcttcccccaggagggggagggggagggggccccgagctggggcctctttactgagactcttttgtacaccacaaactttttgtatatttttaattttgctgcgacatgagatattaaaagtcatttcagtacgtgctgcttgtgtcctattgttttggctgttctgggccaggggaaggagatgaggaaggagggataggtagggtaccacttgccacaatctctgtggctcaagagagaaaggcctttggctgggagagggtgggacattacacaacatctcctgtttattgggcagcatttcaatcaatcaaccagaatcctcaggccaaaagttctacagattatctccaaactcattttacagataaagtgggtggggggagataaagggtggggatacttgtcagagatcacagaatgagtctatgacaaaatcagggcccagactgaagttcctaactccactacagccaatacttattgagaacctactgggtgccaggcagttcttggcatagtgaacaagaaagatataaaacaggcaaggtccctgccctcaaggagcttacatcctatcctagggggtattgcctctaagagggcctctgtctccagggcttccatcctaatccagtggttctcaaacttcaaagtgcatgagaatcacttggagaagaggggatatgttttaaatgcatatttctgcctccataatcagggaataggtagaacatgcctggaaatctgcatttttaaagttcttcaggtgtgtttaaagaacatgcctgggaatcctgcattctggtgcaagcggatctgaggacctggaccttgcagatcttttcttttcttttttttttttttccagagacgagtctcactctgtcacctaggctagattgcagtgatgcaatcatagctcactgcagccttgtactcctgggctcaagcaatcctttcgcctaagcctccagagtagctgggactgcaggcacatgccaccatgcccagctaatttttaaaacattgttatagaaatgagggtctccctgtgttgcccaggctggtctcgaactcgtagtctcaagcaatcctccagccttggcctcccgaagtggtgggattacagatgtgagccactgcacccagccaaggaccactactttaaagtaccctccataaacctgatcatggcatttccttgctttagaacctcccatggttccccagtgccttcaggataaaggtcaaactcttctgccaaactctgacttttggaaactgggcctaaaaccatcttgagtctcatctctgacataacccacctggcccccatagcctctccataccacccattttcctgtttccataagactctcctgattgccatccaacaggctttctcggccatgctttcatgcaggtggagccccagtttttcaagggtccccctccaaagtgcccagggaatgtaaccctgacctggccccaggagacaaatcatgattgaccaaagacagtggtttccaaactgtggtctccagaatagtagcaccagggaacttgttataaatgcagattctcaggcctcagatctattaaatcagccaccatgtgaatggggcacagcaatctgtttgacaggccttctgggtgattctgatgcatgcctacatttgaggacaattggtctaagataattcccctgaccagggattgatgggggcaggggcatgtgacccaattctggtgaggtagggactgctaagtgtccaccagtatccatgttcctccttttctataaagagtttttagctaggcacatagccactcagaataaaagactacatttcccagcctcctttgcagctaggctcagctatgaaccaagttctggccaagaagaaatttgtgctacttacatcactttaaagagacagatcatgttctctgctttgttaaccctgctggctggactgcagctgggtggagagagccatcttgcagttgatagcagaaccactgcttggtggaacaaaataggagacttcaaggtccaggacccagggagctaccacacccacccttgactgttacctgaagaagagagaaactctcctgtttaggtccgttattcggtctttgacacagccaaatatgtcctggcaaatgcatctggcccctggcttcttaagggaaatcttttgaagattcccgggaaaggtttttctccatgaaagaaagacacacaagaaggggaaacccttggccttatctcgggatggtatcatgtgccgctcccaaggccactgcagccatcttgccaggttcgtgagtctgctcaggctgccataacaaaataccacagaccgggcagcttaaacaacagaaatttatttcctgacagttctggaggctggaagtccaagatcaaggcattggcagagttggttttgttacaggaaagggctccccatccagaccccgagagacggttcttgtatctcacgcgagaaggaattcagggcgggtccgtacagtacagggaaagcaagtttattaagaaagtagaggaataaaagaacggctactccatatgcagagcagcccaaaggctgctagttgcccatttttatggttatttcttgattatatgctaaacaaggggtggattattcatgcctcccccttttagaccatatagggtaacttcctgatgttgccatggcatttgtaaactgtcatggtgctggtgggagtgtagcagtgaggatgaccagaggtcagtctcatggccatcttggttttggtgggatttagccggcttctttactgcaactgttttatcagcaaggtctttatgacctgtatcttgtgctgacctctgtctcatcctgcgacttagaatgccttaactgtctggaaatgcagcccagtaggtctcagcctcattctacctagcttctattcaagatggagttgctctggttcaaacacttctgacagtttctcctgaggcctctctccatggcttgcagatggccgtcttcccactgtgttctcacatggcctttccctgtacacaagtgaccctgctgtctcggtgtgtccaaatttcctcttttctttcctttttttatttttattggagttggagtctcactctgtcactcagtctggagtgcagtggcgtgatcccagctcactgcaacctctgcctcccaggttcaagtgattctcctgcctcagcctcctgagtagctgggattacaggtgcgtgccaccacacccagctaattttgtatatttagtagagatggggtttcaccatgttagccaggctgatctcgaactccaacctcaggtgatctgcgtgccttggtctcccaaagtgctgagattacaggtgcaaatttcctcttcatataaggacaccagggagattggattaaggcccaccctaactgcctcattttaacttcatcacctctttaaagaccctatcttcatatactattacattctgaggtactgggggttagggcttcaacaaataaattggagcgacacaataacaccagcaaagtaaaaaatataaaggaatttgatgccagtgttgagctgctcaaataacctgaaaaccctcattattggacttgttttaagagagaataaatgttccttcttgtctaagccacctttggcggggttgtctgttccttgcaggcagaactctggcactgtgtttgctcaagctgttccctctgcccagagtaactttccttccattcacccttcaaggtttggcttgaatgccaccggcctggggaatggctcctgattctgcctttcccaaacaagtcgctggcctgataccagagttcttggcttgtgtgtctttgtctctaaccagatcatggtcagcatgtgcactgaccacctgctgctaatatccccactcctgcccatggcaggcattgataatcaatcccttcttcctgctgggagtagatccggtttttataatcctctacgcagccctccaggcagcccctgccaatcaactggaggtggttcaaaagagatgaatcctatctgccacaattgttaagtctttgagagcagggactttgttttgctcatctcttctttgattcacaagctaattttaataatatgttatcattgtgcacttctgttcccattcaatccctgcagcagccttccaaggcaggtactgccattatcctgcttttgacacgtgagggctctgaggcgctaagagatgaggtaatgtgttcaaggtcatatacatttgagcctatatccaccatctccaaccacttccgctgacatttactaagcacttcatctgttatggctctgcagggagcactgcagggaatacagagatagttttctaattttagtggcatgcaaaacacttattgtcctatttgagattcccagcagttcagtgatgtttggagctagtccaggaataatataagcttccattttatagacagggaaattgaggcccagagagaggaaaaggcttgcaaaagccagtcatggagatgccagagcaagagaccacatgtctcatgcccggctgctgctccaagggtgggaattctgggctggctcaaggggttaagttggagctttcacatccagagcagagtcaggaattggctagcacaccctggcctcttcctgttcgcctggcaggctgagtggagatctcacttcctgagctggggggtgacccggcaggatgcaggggagcaggagggagtggctgtgagagccagcactaagcaacctgggccatttcccctccaagggaggggaaggaagaggaagggctagtggctaggagtctcctgtagctctcacacccagaagcgcgttggggagctctgaccctcccttcagggcactgatcttgaacaccaggctttcagaaaaagcctttcagtagaatccagtgcattggtactttacagtttctaactgctcttccatccatggcctgtgtctttctggccacagctctgatgagcagagcagggctttgggaaattattattcccattggaaagataagaaagctgaccgatctcgtctgatctcggaagctaagcagggtcgggcctggttagtacttggatgggagataagaaagctgacgccaagagaggttacaatgagcaacctggaccaggtcatatacagcaaatcagttccagagcttaggtctccagaacccaggtgtcttggcaaggtgtggatgggccacacagaacctttccatctgtcctgggtggggcatgcagaatgcataggtcctagaggtaaggaacgctaggctcagatccagaccagccagaaatcccaggtcctcctcttactcactgtgtgacctccttgaaccaggctctgaacttcagcctcagtttcaaaaatctgtataataggtactatcatggtactcaacactgtgagtaagttaaaatatgtaaagtgttcagcacagagccacaaaggggaccttgcctccctaatatactcccaagagagcaaaacagctcaagaccctatgaacatggtcagaataaaaatggagtcactaatgttaagaaaaccttgacaaatagagctggggaaggccatagagggttttcatgcttgcataacaaataagactgataacaaaacagataacaacaagactgataacaaaaaagactacaaaaatcacaaccttgcacaaaggccattgaaaccttgcacaaaaaatacttccgcaaggacatctgcccagcaactgcctgtccaactttagactggcatcacccttgctattgatctttgcaatcaagaataattatttcagaaacaataatgtaatccttatttttttcctttaaaaatctttgtcttccccccacctccctgaaaatgcacatcgcttactatggcatatgggtaattcccactgcaatgcttaattcctaagtgaaacatcttttattttagagagcctctgtttgttctttaatttgacaaccactaagcaggtaaacagttaatgtttactgagcacttattttttttcagttttttttttttttttttttttttttgagatggagtctcagccagtcaccaaggctggagtgtaatggctggatctcagctcactgcaacctccaccacccaggttcaagcgcttctcctgcctcagcctccagagtagctgggattacaggcatgtgccaccgcacccggctgatttttgtatttttagtagagacaaggtttcaccatgttggcgaggctggtctcgaactcctcacctcaggtgatctgcctgcctcagcctctcaaagtgctgggattacaggtgtgagccaccacgcccagccttactgagtacttaatatgtgccagaagttcttctaggtgcatttaatccccgcaaggtcactatgaggttaaactagtattatgctcattttaaagacgggaaaactgaggcactggtggttaagggacttcccaaaggtcataaccctagtaagtgccaaagccaggattcgaattcaagcagcctatcttcaaagcccacgcatactgcctcccttaatagtaatgattaattttttaaaatcataacttgcttggctacaatactctctataaggcactttccatccaccttttcatttctcaccacagcagcctagggagggaggcagtgttgactcccaacttatagagaggagggggaaacaggctgtgacagggggaactgacttgccttgccaaggtcacacaacaaggtcagtggcagaagtagggctggaacttggaattttccaaaccaggacttcaaatgtggggggccctttcccagccttggccaattcccaagctcccccaataacccgccttctggctagaggccttgagcctccctcctcaggtcagctctgcctgggcttccacccttcagctgcagggtcccaaggctgtgtcctccacaccccctgccctccccatcagatgggaggggcaggaactccagggctggtggagtttccgaccaggcaggaaaaagaacaaaggaactggatgtgggggtggaagggatggccaggagggtggcaggagtagaggggacatttcaccatggaatatgaagtcaagaaagggaagaaggtaggtgggaggttgggagggacgaagggagaggaatgtccccaaagctggggaagggggcaaactggggcggggtggggggtcggtagcgaggggcataagtggagcctttcttctcatttggaagtaacttccttcccactcttggacagccagacagtcaggctctaaactccctgtttctccactctcagtggcctctggcatccctaacgtggacagacagggaccttctcaggaaacctggccagacggactcagtttgggagattctccacacctgcttccctggtgttccccgcagctccctcctgcagcctctcagacagacggacagacagacacccagcagatccattctcctgctcgtcactgccccaaacagaaggactcagccagggcaattccgataggatgttgcctacacaggcttgagtctcccacctgccccctgcccctcccacctttctacaagggcgtatgtaaggcgtcagccagaagccattcccctcaccccttctgactctgaagttttctagtatgcttctctgggtgtctcacctggttgtctttggagttcagggaggcgctctgattttaacttccatcttacccccatttccaccctcccctctaccccacccccaccagaaacatatgtccgggctgttctaaaaggtgcccacatgaatcacagagggctcagaagggagccaagacatacgtgcatgttttctcttagtttgttcttttaatagacatttattgagtgcctattatgcaccaggtatttctttttttaaagcaataaataagttaatgtaaaattgcatagaagggccgggtgcagtggctcacacctgtaattctagcactttgggaggccgaggcgggtggatcacctgaggtcaggggttcgagaccagccaggccaacatggcgaaaccctgtctctactaaaaatacaaaaattaactgggcatggtggcacatgcctgtaatcccagctactaaggaggctgaagcttgaacctaggaggcagaggttgcagtgagccaagatcgcgccactgcactccagcctgggtgacagagtgagactctgtctaaaataaataaataaatacataaataaaaattttttaaaaatcataggaggtcccatactcagtgctggaggaaactgatcagtttgagtcgagaactgacgggtggaaggaaagtgggtagggaagagtgtttgaggcagaggaacagcatgtgcaaaaccccacagtgggaagtcacatagcaagccagagggactgaaggaggactgtgtagtgggggcccaggggacaagaatgaggcagatggggctggacaggtgggcagagctgagccattcagggccaccaacaaaaatacttacccctccccacccctaatacacacacatacgcaagacaaagtcccagctccatagccggcattcaagatatgttcgtctcataatctagccacggcagactgactgcacacagcttctccaggctcaccctcatccagcctttgaggcatccagaattttgcacatgctgtgccctctgcttggcatgctttctcccagatagtttcttctcattccttaaagttgctacataccccatcctggctccatgatatgggttctaacataagctgagtacccataagaatcacctgagggctcattaaaacacagatcactgggtcttacccccagtttctgggccaataggcctgggatggggttcaagaaattgcatttctggccaggcacagtgactcacgcctgtaatcgcaacactttgggaggctgaggcaggaggattgcatgagcctaggagttcaagaccagactgggcaacatagtaagaccccatctctttaaaaaatatatattagctaggtgtggtggtggtgcatgcctgtggtcctagctactgtgaggcagaggtgggaggatcgctgagtcagaaagaatttgcaattctaataacccacaggttatgctgatggctgtggggccacactttgagaaccaccggtttagatcctggctactcaaagcgtggtgcacagaccagtagtatcagcaccagatgggagcttggtagaaatgcacagtctcaagctccaacccaactgtactgaatcaaaactccagggcagataaagttggaaactcactagtctaggtcatttatcacaagccctggaggcaaggataggatccaggtctccactgaatcctcagcacccagcagagtccagccatacaggtgtaaatgtttactgaatgaatgagtaaatgaacagatgtatttgtggacttgtgttctgtttacctggaaagaacgtgagctccttgcaggcagggaggttgtcttactcacatttgccttgttacacagttaagtaatcacaccacacattcactcagtggttttcagctgagctgccttttgaaattacctaagaaggcttaaaaaaatcttaatggaccgagctcattaaccccaatggctcacacctgtaatcccagcactttgggaggccaaggcaggagaatcatttgagctcaggagttcaagccagcccaggcaacgcagtgagacctcatctctactaaaaatttaaaaaattagcagggcatggtagcacacacctgtagtcccaattacttggaaggctgaggcagagggatcgcttgaacctaagagatcaaggctgcagtgagctatgattgtgccactgcacttcaatctgggcaacagagcaacatcctatctcaaaaaaattaaaaaataaaaaattttatgcctgggtctcagtcccagaatttcttattcagttggttgggagtgtaacctgaacatctgaagttttaaaagctccccccgtagttcgtgtgtgtgtggagtgggggggtgggggttgtttgttttgttccttcgacaaggtcttactctgtcacccaggctggagtacggtgttgcaatcgcagctcacagcagcctcgacctcccaggctcaggtgatcctcccaccttggcctcccaagtagctgggattacaggtacataccaccacacccggctaattttttttttttggcatattttttgtagagacagtttcaccatgttgtcaaggctggtctcaaactcctgggctccagctctcctcctgcctcagcctcccaaagtgctaggattacaggcgtaaaccaccacgcctggccttccccaggtagtactaaaggatagccagggctgggagcgactgctctaaatgcagtctcacacttgagcatgtatcagaagcacctggtgggcttgttaagccctaattgctgggccctactcccagagtttctaatttagtgggtctgggatggggcctgataatctgcatttctctcagttcctaggtggtgctgctggtccaggaatctcatgttgagaaatgctgttctagatggaactcaaactttcttttgagattcagatggctggtctgggctgagccccagaatttacacctttaaccttgatccaggccatttttatgcaggtgcctctggattctacttaaatgtacttattaataatttataacttttaggaaagcacagagaatagcctaagaaatagctatgcacccaccaccactccaccacattgaatcctaatctatattatatatatttatgtatatgatttatatatatgtgtgtacatatatatatatatattttttttttttttttgagacagagtcttgttctgttgcccaggctggagtgcaatggctccatcttggctcactgcaacctctgcctctgcctcctgggttcaagtgattctcctgactcagcctcccgagtagctgggattacaggctcctggcacaacgcctgacaaatttttgtaattttagtagagtcagggtttcaccatgttggccaggctagtctccaactcctgacctcaagtgatccacccgccttggcctcccaaagtgctgggattacaggtatgagccaccacgcctggccttgaatcctaacatttttctgtatttgccccagcctagactcattcctcaaacctgtttggcaggagctacactgtcacctgggtgtttagaaagaaggtcgttggatccagaatgcccaaggtgaactactggttccaccactactagctggtgactttatcagttagttcctctctagggtttactttctccatctgtaaaatgggacttacagaggtaccccttctgcagagttttggtgagaattaaattaggtaatgtaagtaaaagtgagcatagtaagagttcaataaaagcagccactgttatcactctcattcctcctctcctccccagggctttgtatcccccatccgaaggctggtgttccccaaggccgggcgccgggcagcctgtaggagcagcgtgagccgccggcccctgcactcgatgcccctttatccccccgactacctcatcgacccccagattctgctgtgtgactacctggagaaagaggtcaaggtgcgtgcaggatgagaaggggtgggaaaaccttggggtgaggagaccttcacttctccttgacaccaagttctgatcagccgtatctcacacaggggaagttgtggctcattggaaagaggcctgggttcatgtcagccttgcccccaccttcagcaagtgacctccatctgctgagcctcctcagtgttcccatctcaacatgaggctcaaaacctacccccagtggagagtggatgggagagtgttctgtgcgtggaaaagtcctatcttttgtcaactgacataacagaaagggagactcactaaaagaaaatgatgtttactcaggaataggcattgcaatgggaatatgcgtgccatagtaaactgtgtattcaggaggtaaaggaaggcaaaggtttttaaaggaaaagtgaggaggattacataattgttttgagataattatacctggctgcaaggatcaataacaaggatggcaccatttccaagttggatgagcagttgctgtccttgcaggaatatgtgtgtgtgtgtaaggttgtgatggcctttgtgcaaagttgtagtttttacagtctttttgatagttcttgttatcaggcgttcatgcatgagaatcctccctcctatttgtcagggcttttaacacaagtgactccattctgattgacaactttgacatttcccatgagattttactgcagtgaccttgctgttactcggacagcgtccagattaacagcaaaacacaaaggacttccaccacttaggagctgtacttctttttttttttttttgagacagagtctcattctgtctcccaggctggagtgcagtggcacgatcttggctcactgtaacctccgcctcccgggctcaaacaattctcctgcctcagcctccttaatagctgggactaccggcacgcaccaccacacgcagctaatttttttgtatttttaatggagctggggtttcactatgttggtcaggctggtctcaaacccctgacctcaggtgatccgcccaccttggcctcccaaagtgctgggattacaggtgtgagccaccacacctggcatgaacaccatgaagaggaaatgatggatcttcatttagcctaaaaagattgatatgggggtagggttgtctgaactggcaaacaataagccacctagtaaaatctgaatttcagataagcaatgaatactttcttagcataattatgtcccaaatattgcaagggactaaaaatactaaacaacttaaaaattattgttgatcaacggccaggcacggtggctcacacctgtaatcccagcactttaggaggccgaggcgggtgaatcacgagatcaggagttcaagaccagcctggccatcttttagtagagatggtgaaacccgtctctactaaaaatacaaaaaattagctgggtgtggtggtgggtgcctgtaatcccagctactggggaggctgaggcaggacaatcgcttgaacctgggaggcagaggctgcggtgagccgagctcacactgctgcactccagcccgggcgacagtgcgagactccagcccccccacgcccgccaaaaattgttgttttcaagttcaaatttaactggcatcctatattttatctggcaaccctatatggagggaaaaactaacaaataaatctgcttaaaaattgagggctgaaatttgataaagaataaaaagaagagaaaatgtttgattggtggattcacctagaggaatagaactaaaaataattttttaaaagttggccaggcatggtggctcacacctgtaatcccagcactttgggaggctgaggcaggctgattacttgaggtcaggagtttgagggcagcctggccaacatggtgaaaccccgtctctactaaaaatacaaaaattagctggacgtggtggcacgtgcctgtaatcccagctactcaggaggctgaggcaggagaatcgcttgaacccgggaggcagagcttgcagtgagctgatatcttgccattgaaccccagcctgagtgacactgagactatctcaaaaaaaagttaactattatattgagtaacatttaagtgctaacattaggatataagagtaaaggaaaaatttgttgatttagtgcatcatttttcctgacaaaatggtatactaatttgatccaacattcttccctttccatttgacttctgcaacaagaccataaggaaggcaagtgatttgcaattcctttgacaatgatgcttggggtagagagagccactcaggccagaggaaatttacaggtggtcagttctttcaagctgttataataacttttgcttccctatggaatcttatagctagatgactatgtgttaaggcaatataagccagcagttgagagtgtgggctctggcatgtggatcccagtttgatcctctctagctatctaatcctgggcaagttctttagttagccacaccctgccttggtttttctcatccttaaagcaagggtgaatgagtgaatatatagagagcgctcagaactttgcctagcttctattaagggctcagtaaaagttattatcaggtatattaattcatgtatttctatctcaatctatccgcactgcatcaatgagaaggccagggttcttcaaggtttcagggtgacatctctgtgtccttctctcaccccgatttccatccagttcctgggccaccttacctgggtgacttcctcactgaacccctccagtcgggacgagctcctgcagctgctagacaccgccagggtgagactctggggagggaggagggcaggatctcgctcccttctccctcttctacctgcggacctcgggaactcgagatctgcccctccctgcagcagctgaaggagctgccgctgaagaccacggcggagcaggacagcatcctgagcctgtctgcccgctgcctgctgctcacctggcgcgacaatgaagagctcattctgcgaatccctacgcacgagatcgccgccgcctcctacctgcaggacgacgcgctgcacctgctagtgctcaagaccggtgcggcgggagggggcgggggcgggggaggggcgggggcgggggcgggggaggggcgggggcgggggcggggcaggggcaggggcaggggccggaggtgtgcggatggagaaggagagggacctgcggcgggggcagaggagatggaaaaggtctgaccatactaccctgagactaggggcaggccgaagaggctctgggaaagcagacagggcctgaggttgaggatgaaggtgggtggcctgagccactacactgaggccaggtggtggagcactaagagggtggagaagcccaagacctaggccagggctggatccgcagttaccacccggctctgaggctagagtggacccttgggctgggggcggggcctgattccaggggcggggctgaggagaggcgggaagtcagaatccaagggggcggtccctgaaacccgggactgggtccccagttaaggctcccttgggaggggacagcctgaccaccaccctctgttcagagggcaggtctgaggccaggggcgcaggcgtcgtggggagcgtggaagccacctggccagaccaccgagaggccaggggtggagactgaggccgggggcgggcccgaaagtgtggaagcggagtgggcggggaaccgccgcgctactttaaagccgggggcgaggcggcggtggaaccccagagccgcgaggtcaggtggccagccggcctcggcggggcgggggggtctctgagtcccgatccccgcggctgacggtcccccggactctcctaggtctgggtgtggacccggtgccggccggcgtggatgccagcccaggcggcgcaggacgcgaccccggcccgccaggcggggcgcccgagaagcggcgggtgggcaccgcggagcggcgccacaccatctgcagcctggactggcggatggggtggggtgggggcgccgcggaggcccgggccgggggaggcggcggcggcagcttggagcgccagcgcgccggggcgcgggcgtcgggcagctgggagcgacggcagacgttcagcggcagctgggagcggcggcacggaggcggcggcggcggcggcggcgcgggaaagccgggcggtagctgggagcggaggcaggcgggcagcggcgggggaggcagctgggagcggcgccaccccggccccaacccgctcgacccgcaggaccccagccccgacgcctactgcaacctggtcatcctggctgtagccaacagggtgagcccgagggcagcctgctcccaaagcccggcttcgggaacgctgcttccccgcccccaccttgcccccgccccacccaccaggttcctaggatctgcccctgccttctccctgcacctgccccacctaatggctcctaaactccggacctggacacctccagggcatctccccttgactccctcaatgggatgaactctcaaaatggccaaaacaaactagatctaacctccagcccgttccttctccaacgttgtcagtgttggccccaccacagtaacattcacgaggacactaatcaccagcgtgaatctagggccagctcatgccagacacagggctgcatcaactcatttaattctcacagcaacctctggaggcaaatattacaactactgtattcccattctatagaaaaggaaaccgagatccataggtgaagtaacataggcaaggtcacacaggaagcacgtggtggttttaagattcaaatccagtaagttcagagccagtactcttggtaactaagatggccacccaagagagaagccttcctgccattcttccttccccctccgtcttcccctctgcctcccccatcctcttcattcacccttgcttttattcacccgaccatgtttcttgagtgccagctctgggctaggcaatgggctaggtgctatggatacagacgtgaaaaagacatctggtgtccacccttagggagctcacaggcgagcagacaccttcaagttctgagcattctaagcttttcctctgatcttggaccaccagatccctccgtataaaaacagtggtgaatgaaacagacatagttcctgtctagatggtgaggcagataataaccagtaaactcagacaccacagctgtctctctccccttgaaacacttcctcacttggcttccagctctccaccttttccaggcttttctcctaccaagctggttcctcctcttcttcagaagttggagtgccccagactttgtccttgatcttcttctctcctccatctatccttcatctacccatttctaggtgatctgcatctgaagatctaacgactgtttcaaacccaacacatccaaaactgagctccaacctcctcccccaaaacctgccactcccttggtttccctgtcacaattaatagcagctgtgtccttacattggtcaggccaaaaccttgctgtgggccttggctggctctcacgctctctctttctcacacacaccccatatccactctgtcaataaatcctgttggctcttatttttaaaacataaccaagcctgtaatcccagcactttgggaggctgaggcgggtggatcacctgagttgaggagttaagaccagcctggccaacatggtgaaacccgtctctacgaaaaatacaaaaattagccaggcatagcggcgggtgcctgtaatctcagctacttgggaggctgaagcacgagaatcccttgaacccaggaggtagaccgcaccactgcactccagcctgagcaatagagcaagactccgtctcaaaacaaaacaaaaaaacatcaaaatccatttacttctccccaccctccccctgtacccacccaggtccatgccccattttctctcacctgaatcatgtggtcatcctctgactggttcagcccttgctgacagtctctttccccacacagtcagagtggtcccgttaacatgaaagccacatcatgtcactactccacatcttccagtggcttcccatttcactccaagtaaaagctaacatccttacaattgcttacaaggccatttgtactccagccaccatgcccacttcctctgtggctggaaataggattccagacaaagctaacagtcatcccactggactgtgagggctttgcggtactgaacctggcccagtgtcggccacataataggactaagttggaatttgtggagtgagtaaataagtgtaatcccaacactttgggaggctgaggcagggagatcactagagcccaggagttccagaccagcctgggcaacatggcaaaacaccgtctctactaaaaatacaaaaaattatctgggcgtggtggtgtgtgcctgtcatgcagctactcaggaggctgaggtgggaggatcacctgagctcaggaggttgaggctgcagtgagccatgattgtgccactgggcgaccggagtgtgactctatctcaaaaaaaaaaagttgctttccagggttgtctgagcatctggcttcttatctgagtcatcctggtcctaagaaggatataggagttagagtaaaaaacaacctgggtgctggtactaatgccatgaacctgctgtgtgagcctaggcaaggcacttaaccactctaagtctcagcatctttgtctgtccattttgtaggtctatggtaaggatcacctggtttaattattaggacacacctactatccccaaatgcctatcctgggttacgttttaatttattctttgggcttttttatttttattttttgtatccaaccatccattgtcttgggcctttttacagacacaacatagagaaaaggttcatgaagacagtgtcttcatcaattactggttttctgtgtgtcttgcttaaggcataaagaggtaaattcaagaactaaatacctattcacatttgtagtctcaaaaaagttttacccaagaacttaaactccttccttctatcagagattgaattttatttatcctgtttccattttcacactgaatgctaggaagctcatatctaaatatggcttccagtattagtaactatattgagcctaaaattttgatacatttaatcatcccttctcctactaggtgttaggagaactggattctaatcctgactaatcacttcccctcactgggcctccgtttccatatctatacattaaactaaattaggacttatcttagaagggcatcaggaaggctgatgaatcctccacaaatctggggtacatttttcatggcacaagagttagagttgtcactgaattctataaaggggttctaagatccagagagtagccatcgaattttgatggaaaaattcttgaaagccaatttaaagggctctataggtgtgtatctttgtgcgcatcttcacacactgttttaggaagcagggtaacatcttggtcattggtgaggacctgagctctctctcctcctccctgggccaggacgctgcagaggagtcctgcgcactcatctgtcaggtcttccagatcatctacggggaccagagtattgagtgtgtggaccgggctggctaccactacacatccacacctgaacggccatggctctgcagccgcagtgagtaccagaactcctggcctcccctcctgtgaaacatcccaaaaaggccaggggagggaagatgtcccaggacttgggctgatgaaggtatttagggctcctgatctctgccataattacagtgtaccccacaattgtaggtgaaatgtcaattttctttttctttttcttttcttttttcttttttgagacagagtctccctctgttccccaggctggagtacagtgatgccatctcggctcactgcaacctccacctcctgggttcaagcaattctctgcctcagtctcccgagtagctgggattacaggcatgtgccaccacacccagctaattttttttttgtatttttattagagacggggtttcaccgtcttgaccaggctggtcttgaactcctgacctcatgatccacccgcctcagcctcccaaagtgccgggattacaggcgtgagccactgcacccagccatcagttttcatgatgatctcaaacttagcttcttcaaagatgtttggattgtcaaattcagaacaagccccctagagctgaactcttctctctcccttttgtttttgtgtccctatattgcagcaacctaagcacatgtattgtctgcttactgagccattggtcccactaggaccctaacacaaaaccaagatttccagatgggtgcttggatgcactcaaggactagaaggagaatgagactaatagagacatttgttgagcaccagttgtgtgccaagcaccgtaccaatgtgccatgtcctcatagcaaccttgcctgtcctctttgtcactgtatcccctgtgcctagcacgagactgggtacatcagatactcatgaagtatttttctgaatggatgaaagaactctctgaggccttaggattcccattttttcgtttggttggtttttgttgttgttgttgtttgtttgtttgagacggagtctcactctgtcgcctgagctggagtgcagtggcacgatctcggctcattgcaacctctgcctcccggttcaagtgattctcctgcttcagcctcctgagtagctgggactacaggcatgcgccactacgcccagctaatttttgtatttttagtagagacggggtttcaccatgttagttggccagtgtggtcttgatctcttgacctcgtgatctgcctgcctcagcctcccaaagtgctgggattacaggtatgagccaccgcgcctggccacgattccagttttacagatgaggacattaaggctcagattagtcaataaattactcaaggtcacacagctggtaagtggcagagtcaggattcaaatccaggtctgtctgattctgaagcttctatcagcaacaaccttattccccatgctgccttcaggccagtgggtgaattccccagccattgtctcccacagcatggtaccagcagcagagtgctcgttcttttcttcagaagaccctcgcatctgtgggagctgtgcttgttgggaggctgggttagttcaactctcacaaggatgataggcaaataaatgagataattcaacaaatatttcaacaaattcattcatttagcaaatatttattgagcacctagtgggtcagatccagtgctaatcagtaggttattctggtgagcaaaaccagaggtggcctgtcttcatgaagtttacttagtggaggcaggctgacagtgattaaataagtacacaaataaatacacaaccacaggttgggcacagtggctcacacctgtaatcccagcactttgggaggccaaggcaggtggatcacctgaggtcaggagttcgagactagcctggccaacatggtgaaaacccatctctactaaaaatacaaaaattagctgggcatggtagcaggcacctgtaatcccaactactcgggaggctgaggcaggagaatcactcgaacctgggaggtggaggttgtagtgagcagagatcacaccactgcactccagcctgggcgacaacagcgaaactctgcctcaaaataaataaataaccacagactgtgctgggagaatgtataatgaggaactggccccacctggagggtaaggaagcaacactgatcagagatcagaaatggtagggctaataaccagctaaatgagacaacaggactaggaagagcgcaagctctccgtacttggtgtttctttgctctgaaggttttcagatccttccccttcacaagtttcttcctctctttcttcttctttctttctttctttctttctttctctctttcttttcttttcttttccttccccttcccctttctttctttcttttcttttccttccccttcccctttctttctttctttcctttcttttttcctttcctttcctctttttctttctttcttttttcctttcctttcctttcctctttctttctttctttttcttttcttttctttttcttttcttttatttattttttttcagggtctggctctgtcacccagcctggactgtagtggtacaatcacggctctctgcagcctcgacctcccaggcccaagcagtccttctatgtcagcctctcaagtagccgggaccacaggcatgcaccaccgcacccagctaatttttttgttattgtagaaataaggtcgctctatgttgtccaggctggtcttgaagcctgggctcaagcagtcctcctgccttggcctcccaaagtgctgggattacaggcgtgagccacaaatttttttttctttttttttgtcttgcctgaaacacacagtttacaaaatattccctcacatgtttcctcatctgctgttcccaaggctcctatgaggtaggtggggggtggtattgtccccacatcggggaagttgaggatcaggagaggggaggggagttccccagggtctgttgtgtgttggtgtcagaggcaggactagacttcaggctgagactgagggtggggcctcagggagcaggggatgctgatccctgctttgctgcctctgacagtccctctgtctgctggtcccaggtgagagctgccacacagatgggacgtatgcctatgatgccgacttcagctgctgcagctccttgtgagtacagcccctgtcagggactccaccctgctcccctacccctgcacaaacagggtgactagagagggtaggagaaggtgacccaaccttgatgtgtgctgagacactgggcactaagagggggaggtaaactgagctccctgactctggaaacccacaggatccagacccttgagagacccaggagacaccagaactcagatgtgggtccacacagtcctgtggttctctcccagtcatccaggcacagtggtctgcagaaaccaaaatcatagctacatgccaaaaaaattatcttggcttaattttggttccatgtaatagaaaatccccaaaaagagtatcttaagcaagatagaacttttttttcttatatttgacataaaatagagcagcaattcaacatttcatggttgttaggagctcaggcttctcttttccttccctaccctcttcaggacttgcagccatcctcaaggtcacctcatggaccgagatggtggttgtagctccagccatcacagtagcatgctaaggggcctctttaaagagttttgccagattcccacctgatgacttctgcttatatctcataggccagaacttggtcacatagccatcactagctgcaagcaaagctggaaaatttaggattaaaaaaatatatttcaggctagatgcggtggctcgcacctgtaatcccaacagtttgggaggctgaggcaggtggatcgcttgagcctgggagttccaaaccatcctgggcaacatggcgaaaccccatctccaccaaaaatacaaaaattagccaggtatggtggcgcacacctgtggtcccagctacttgggaggctgaggcaggagaatggcgtgaacccaggaggcggagcttacagtgagctgagattgcgccactgcactccagcctgggcgacagagcgagactctatctcaaaaaaaaaaaaaaagaaaaattcaggccagtcatggtggctcacgcctgtaatcccaacactttgggagggcaacgcaggaggatcacttgagcccacaagtttgagaccagtctgggcaacatagggagaccctgtctctattgaaataaataaataaacaaataaataaataaaattttaaacaattcagttgggaacattacccagggttctgtttagggtgaccagccatcccagtttgctcaggaatgaggggttcccccggatatgggattttcagtgctaaaaccaagaaagtcctgggttactggttgatcacctagttatattactaagggcttcagtttggcatgtagcagtctctgccagtgatatatgtcttattgtttctttcctttttagtggcaatagatttgccttcctcatactgtatgcccttaggctagtctttaaacaaccagatatctactgaagagataaaatagtgataatagcgtttgaacattgaacttgctatgtactaagtgctgttctataaagcactttattttttcatcaacatagtaacattacagcagctactgtttattgcttatagcccataattctaagtgttctacaaatattaactcctctaattctcatgatgacactaattattattatcccattatacagatggaaaaattgagaaatagagaaattaagtttagttttcccaaggtcaagcacctagtaagttgtaagtatgggatttgaacagaagaaggctggctccagaatccagtcctttaaccacaaagctacacggcttctttgtaggtaataatggaggatggttctggaacaatttagagacaaggaggcaggagcctaaggttgagtttttattaagcaatatttcttgagtacctcctatgtgccaggcactctgctgtgtgctggggatacagatggacacaagacagagggcaaaacctgggcctggcacatagtaggtgttcaacaaatgaagaaaaccaaagtccctgctcttgtcaagtttacagtctaggataggaggcaatgaaatcgcaatttaacagtaacaatcattaatggtaataagtactaaagggaggctcagggtgctataagagaggcagagggggaccgcaactcagctggagagtcaggagggcctctcagaggtgatggcacatgaactgaggcttggaggatgaaagggggaagagtgttccaggtagagggaacagcaaatgtaagaatcctgaactaaccaggcgtggtggctcacgcctgtaatcccagcattttgggaggctgaggtgggcagattgcttgaggtgaggcatttgagagcagcctggacaaacatggtgaaaccctgtctctactaaaaatacaaaaattggctgggtggcacatgcttgtagtcccagctactcaggaggctgaggcatgaaaattgcttgaacccgggaggcggaggctgcagtgagccaagaccgcaccactgcactccagcctcagtgacagagcaagaatctgtctcaaaaaaaaaaaaaaaaaattttgaacaggatagagcttagtgggtttgaggggcagcaggtggccactgtggctgtggcaaatggtgtgagggagagagtggtcagagaggatgcttgggggtacctggaaaggccatgcatgtcacaggtaggccatggactgagggagcatgttcgacagaggttctaacccaacctaggggaattagggaacactctcctgaggagatgacatttaagatcacgggatgagtaagagttagctgtgcaaaagggaggggaaaggaggcaatccaggcagagggaccagcaggtgcaaacacccagaggtgaggagatagtagaggaagaaggagaaggggggtggggggcgcgaagcacaaagagcaaaggcaaaggcaagcacagtgacagatgagacttgagaggtgccaggggccagggtatgcgaggccttggaggccagcatgcagtctaggatgaggcctcctaccttcagcctgcctgagggccaggagctggagggaggcgagtgaaggcccttcttcccgtgcctgcagtaatggctcccaggacacctttgaagcatgttacagcggcacgtccacaccttctttccatggctcccactgcagcggcagcgaccacagcagtctgggcttggagcagttacaggattacatggtcacggtgagctggggccggtggtgggaatggcacaagcaaaagcctggaggctggagtaaacattttgggaatggcacattgccctggacataacctaagcagaagacatcagaggtcagagcaggaaatgaggttaggagagtaaactgaggccagcttgtgaaaggccttaactaatgtcagctggcattaattgagtgcctgctgtataccaggcaccattctaagcacctttcatgcattatttcttttaatcttttcaacaaccccaagaagaaaataccatcattatcctcactttgcagatgagaaaagcaagcatcatggaggttgtcacctacccaagatcacagagctgatccagtgaaggggtcaagatttgcactcaggcagcttgagtccacatcctattcttaaatgcagcctaagggatctagatgtcctctgaatagcccatgggaaggttttcagaggagagctggaccaaacatgcccttagggaaggctctgggcctttcaggcaggggttgggtggcgctgcttcctgggattgatctcgaatggtgtcccccacatagttgcggagtaagctggggcccctcgagatccagcagtttgcgatgctgctgcgggagtaccggctggggctgcccatccaggactattgcacaggcctgctgaagctctacggagaccggcgcaagttcctcctccttggtgagcccccgctgtacccccagaggtcagctagggcccctgcttggtccatgccatcccagtcaggcaccaggctgcaaatgttttctccttatctttcagcctctgatgaaacccagatcatgagattcacagggcagatgaggagcccaaagtgcagagtagggaaaggacttgtcagagctgggagacactgttgataagaagaactaagcagtggtgtggccatttcatcctcacagcaaagctgcgagagggactgattcttcccatcttaccccacacggaagctgaggctcagaaaggctaaggaacatgtccaaggtcacacagctagtaaggagggctaataataacaggaggaataatacgaataagctgacatgtgcttggcagttaccctgtgccaagcatcatctcattaaatgcccccagttctgagaagtagatactattaatggtccccattttgcaggtgaggaaactgagactcagagttacaaagtaaaggactgaggtcacatagctagtaagtaggaatggaaataaaacaaactgtttacagagtgctcagtatgtgctgagtaccttgttatttaatcctcacatccctacccagagaacaggtgcaattatctgttttacaggtgaggaaaatgaggttcaacataattaatcaatgggaatataatgatggtactaataataacaaaaataggcctggcgaggtggctcacacctgtaatcccagcactttgggaggctgaagctggcggatcacctgaggtcaggagttcaagaccagcctggccaacatgaaaccctgtctctactaaaaatacaaaaattagcagggcgtggtggtgtgcgcctgtaatcccagctacttgggaggctgaggcatgagaatctcttgaacccgggaggcagaggctataataataataataaaagtacagtaatctagtatgtagtgagcattcactgtgtgctgagcgctgtgtcgttattcgctggctcagacagttaaggaccttgggcaaggccacacagccagtgagtgacagcagggatttgcacccagatctgcagagaggacgcttcccctgtggaagggaaagggaacgtgtcctggggactcaccatgcccctcggctcgcagggatgcggcccttcatcccggaccaggacatcggctacttcgagggcttcctggagggcgtgggcatccgcgagggcggcatcctcactgacagcttcggccgcatcaagcgcagcatgagctccacgtcggcctccgcagtgcgcagctacgatggcgcggcgcagcggcccgaggcacaggccttccaccggctgctggctgacatcacgcacgacatcgaggcgctggcccccgatgacgacgacgacgacgaggatgagccccggggctccaggggcgggagcgacgccgcagaagacaactacctgtagccaccgcccctgcggacggcgtggctcagcagcccacctctgagtctcagctttgcttcggggaccctatccccagggcccccccatcacacctggcggggccggggggtcttcactccagggtctcgctccctgcccttggggcccggggccatgcagtacctggagtgtcctgcagggggaaagcgaagccgggccctgaagtccggggcagtcacccggggctcctgggccgctctgccgggctggggctgagcagcgatcctgctttgtcccagaagtccagagggatcagccccagaacacaccctcctccccgggacgccgcagctttctggaggctgaggaaggcatgaagagtgggctccacctgctggccgactgagaaaagaatttccagaactcggtcctattttacagattgagaaactatggttcaagaagagaggacggggcttgagggaatctcctgattctccttatatgacctcaaactgaccatactaaacagtgtagaaggtctttttaaggctctaaatgtcagggtctcccatcccctgatgcctgacttgtacagtcagtgtggagtagacggtttcctccacccagggttgactcagggggatgatctgggtcccattctggtcttaagaccccaaacaagggttttttcagctccaggatctggagcctctatctggttagtgtcgtaacctctgtgtgcctcccgttaccccatctgtccagtgagctcagcccccatccacctaacagggtggccacagggattactgagggttaagaccttagaactgggtctagcacccgataagagctcaataaatgttgttcctttccacatcaaacattttatgactcagtttacctttcttgccttgtaataagcaaaagatgtctgggtgcatcctaccccaactgaagtggtggtgagctattcagaagatcctcaggggagttcactgtttgggaagaagaaacagtacttgttcccttgcagccttgttacagcctagctctgtgctcaagtcacaaacaagaaatagccaagactccacaggcagctatctgggagtctggggtagtcaaagaaatgggaaggaaaggttggagaggtagagaagtcaggataaggacagcattcagcacagcctgagtaaaggctggaaagctaaaagggatgaggcctgagaggaggccagagactcacataggagatccaaaatgtgtttgtaaaaccttgcaaaggcttccatggccagacacattgtacacaccataaaataggcactgttagcaattttcaaaaaaatgttattaggactccaggtccaaagagttccataattcatacttggtttgtggtaaatgatcatcccatcatcactggtccatgtagggcccttctgatgttttattttaccctctcctgatccacatgttccccacactccttttccctctttactatgagcgcctaaccctatgtgctgatatatgtccctggacctaaactacacagtgctttgtgtgtgtgtttgtataaatgatattacataagaatttcactctattccttctctcactctgtaatgtttttctatttaaaaagaaaactaagaaaatttttagagacaggtttttgctctgtcacccaggctggactgcaatggtgcagtgacagctcactgcaagaactcctgggcttaagtgatcctcctgcctcgccctcccaaagtgctgggattaaaggcatgaaccaccaagcccagccaccctataatgttttaaatacctacatatgtgctgttgaaaaatctcactgttgcatccaactgctgcaaaatatttcgagttgagcatccgctgttttctttatccatctccccagagatgaacacccaggttgcttccaactccctcttaccacaaacaacactgtgattgatgaacatttttgtacatgaaacttatgggcctatgtgagcatttctttgggctctaaatccaagagtggaattactagatcacagggcaggttttgaatttcattaacttcttccagaatggctttcaccaacggtgagtgaaggatgctgtttcccgacatcttcatcagatttttcatcatctgattttgtaactttgcattcagtgtgggtgtaaggtggcaagttgttttaatttgcatttctctgttaatcctgaaatttataacttccttctatactagtcagccatttgagctttcctttctgtgacttccttgttcatatcttttgttcatttcctactgggcttcctgtctttttctcattgatttgcaagagtagtttataaattttagatattaatcccttttggatgttgatgttccaggtatattcacctaatatatttgccttctgtcaagtttatctgtgacagtactcaaacttcagcaggcatcagaatgtcctggaaggcttgctaaaacacagatgtctgagccccactcctagagattctccataagagaaggggaagggcctgaaaatttgctttttcttttttggggggacagagtcttgctctgtcacccaggctggtgtgcagtgacgcaatctcagctcactgcaacctctgtgcctcagcctgctgagtagctgggattacaggcatgcgccaccatgcctgtctaatttttgtatttttagtagagattgggtttcaccatgttggccaggctggtctcaaactcctgacctcaggtatctgccctcctcggccatccaaagtgctgggattacaggcatgagccatcgtgcctggccaataatttgcatttctaacaagtacccaggtgatgctgatggtccagggaccgctctgagaacaactgatttgtgatggcttccattgggcaaacttgttctattgagcaaattccttaattttgaggttgtcgattttatttattttcattttctggatgaaggaactggagttcaagaggtgaagtgaataccccaaggtcacacagtgagctgggctttggactcatgtctggctaacccagagcccatgtccctagcctctctactgtcctgtctctgagactttgggatgtagtggccgtagcctgaggcattccgacctgaggctacagggagccttagtaagttcctgagcaaggcagccggagagggaacagttggttgggtagggacaggggccaaagatataggagtctctcttaaaggccttggggctttccaagaaaagctcaaaaactgccgaaaatcctagccacagcacagtgacagggctgctgagaggcactgggacagacagttcttaccccacagctccagggatggggtaatttccctcacaccccaaggaagtccccacccgctccggaactaccctcttaccaaagccatgtaaccccttagttcctggggtccaaagggcactgtctggggcaacccaggcactgagtctggagactctggccacacttcctcctgtagcatccagagaccctgccaggaattgcttcccttgttggttcagttcctgacatcacaagaggggaaaaccccctaggggtgggatagctggttcccaaggacttctaggggtagtgcaagtatggaacttccccaccagctggatcccctggggacggtcttggcccaaacgtgagtggtaaaattgtctccagctgccgtagatggacgcctctcccaaggtggggccctgaaacttcctacccactccccacttccactggcagctcccagcagtccttcccaactatgtgctcaggagcaggagtcctggggccactgtcattcagccgccaagcatttagagggcacttgctctgtgccaggcattgcacaagacactagagggagatacagcacagtctgcccactgaggggcacactgatggggaaaacagttcccagataatcatagcacaaagttctcaattgtaaagtcaaagagtgagacaccagctctttctggggaagctggaaaaggtttcacaggggaggtgagccatgagcgagagcttgaaggacaaggtttttggtgggtgaacaatagaagagagagccctccagatggggacccagcacaagcaaaggcaggggagcttgaaggagcatggcgtgctctaggactggcaaccggttagcactcgtgcagcacttaggctccctggccagagggtcggagggtttttaatccgagctctgccatctgcttgttcggtgaccttgggaaagcccctaaaatgtccctgggtcttggtttcctcatctgtaaagtggggttgataatagcctcaccctcgtagatcccatagattgtcatgagtcttaagatatttcacgtaaaagtatatgtagaaagtgctcaattagtgaccattgtgatagctggaggaacacggagtgtgtgaggtgggggacgaggtgggtgggtaggagttgcaggagaggaaaccagagaagtggatagattagaagcccttgaagggcaggctaggaagcataggcaatgggaggctatctaatgtttgttgttgttattgttgtttttgttatcgttgtttgaggcgggttctcactctgtcacccagctggagtgcagtggaacaatcaaagctcactgcagcctccagctcctgggctcaagccattctcagccttcaaagtagcagaattacaggtgtgcgccaccaggcctggctatttctaaattttttttgtagagacgtgctctctttatgttgcccaggatggtcttgaactcctgagctcaagggatccacccgcctgagcctcccaaagtgctgagattacaggcgtgaacaaaggtgccccacctgggaacaagccaggggacctgcattttcttgaagcgaatcaagctgctggagaggaggatcaataggaaaacagaggagcgtctggaagcagggaagtggggaggaggctggaaccaggaccacatgagagatggtaagacctgactgagctggggtaagaggaaggaagaggagagagtaggttcaaagaggaaagaagagaaagagaactctgcctacccccacccccactcagaaatagtagcccctcacattctttgaccaaattcattcgttcattcattcattcattccacaaccatttatttagcatttaaaccctggcctcttggagtttacattctaggagtttatattactattaaatgttactaggagcttccagatgcagtaacgacccaatcaggtctaaatggccagaaattgatggccctcttggtgggtcctcccacttgacttgttgcttatcctcaggtatttcagagcaggggcagaggggtcttaaagccaggccagcctgttctgcccacttcctaccttggggagttcactgtctcctatggcagccccttctatccaatgcaagagctaacatccacctccttgtccccccactccctgcccgccgtccccagggccccccacctggcttctaacatcacctttaagagccctacacggtatccctgatgcctcagccactgggcagccctgcagcaacgtgcagaaaatgatgcaatctgcagaaacttctcaacttctcatttatatctaaaagcagactgttctcaaaaaaaatattttcaaagcctatcatgcagacaaagggggagtgcgtttgatgtgtaaagacctacaagtaaataagaccaacagcctaatagaaaaataggcaaattatttatacagacagttcacagaaaatacaaacgactctaaaacgtgtgacaagatgttcaacctcactcataagataaatgcaaattaacacaacaccgagcaaccatttttcaattaagagattggcaaagtttggaaaagtgtgatcactcactatgtgggtgtaggtgtgaggaaacagacactctcacacattcctggtgggagagcaagttggtataaaccctactgagcaatatctaccaggatgcaggagccctttgatgcaacaattccactgccaagaatttctccggcatttatacccacacgagtggaaaccaatgtgcaaggaaagtcattgcagctttgtctctaataacaagagtttggaaataaaccaaatgttcagtgataggggtctggttaaatgaactgtggctcatgcaggcaataaaataccatgcagccataaataagaactaggtagctctgtgcaccgatacagaattatttccaagatagagtaagtgaaaaaaaaaaaaaaaagcaaagtacagaacaatgcactttgaatagtgctgtatttttgtttaaggaggcgggaaatgtcttttaagtatagaatagttctggaaggtacacaaaacaagttatagttgtgcttctgagctggaggagtgtgtggctatagaataaagagggaaggagactttctctgcatgatgtgtcctaaatgttatgtcatgaatatgaattacagcagagcaattttttcaaaaaccactattccagtattgtggtatttactgaactctatagacactatctgtttccatatctgtctgacccctccaaccccacgcctactctcaacactcacgcttacacacacacacacacatgcacacacacacacacacgcacacacacacacacacacagaatcttggaaagggaggctggttctgactcattcctacattccctggagctcagcacagcaccaagcacagagcctcctgccaacaatcatatgagtgaactatcttggaaacagatcccccagccccagtccagccttcagatgacttctcatcaggcgttgactgcagcctcataagagatcccaagccaaaaccactaagctaagttagttccacatttctgacctacagaaactgtgtgagataataaatgttggccaggtgcagtggctcacacttgtaatcccagcagtttgcgaggctaaggtgggaggattgcctgaggccaggagttcccgaccagcctgggcgacatagtgagaccctgtctttattttttttaatagttacaattttttaaatctcaatcctgcttcttctgtataattacacagttttaagttgctaaattttgggtaatctgttacacggcagtatataactaatacaatcaccaaaggtttgtttttgtttttgtttgttgttgttttgtttttttgtcattgttgttgttttgtttttgtttttgagaccatctcgtgctgtcatccaggctggagtgcaatggggtgaacacaactcactgttacctcgacctcctgggctcaagcaatcctcctgccttagccacccatgtagatgggacaataggcatgcatcaccatgcttggctaatttttaaattattattattatttttgtacagatggggtctcactttgttgtgtaggtcggtctcaaactcctgggctcaagcaatcctcccacctcagactcccaaagtgctaggattacaggtgtgagccaccctgcccaggcacaatcaataagcctttattaagcatttgatgtgtatcaattccatggtgattgcaaaagaagaagacatggtcctgcccttaggggagcaagccacctgcacattcattcctagactcattccttacttcaaccaacattattgagcatttactatatacctggctctgtgcttagtgttgacccataggatgtcagcaattaaaatacaccatagaggcctgtagtcccagctacttgggaggctggggtgggaggatcacctgaaatcaggagttcaaggccagcctgggcagcatagcgagacctgctctcaaaaacaaaaatgtgtgtgtgtatatatatatatatatagtaggacaagagggaactttctagagtgataaaaatgtatctcctaatggggtttaagttacataaatatatatgcatttgtaaaaactcagcaaatgaacacgtaatcttttgccctttgcctgtaaatttacattaaaagaaaattactgtaaacaaatattgaaattgaactccagttaataatatgtgtgttgaggtaatttctttaaaatgcatcttaaaagatgaattgatagacagatagatgaacaaacatggttaaagcaagtaaaatgtcaatggtagaatgtaagtggtgagagtaggtattttgtcgccaaagtctttaaattttgctgtgtatttggacattttcataataaaatgttcagaaggagcaacacttgataaccatatattccaattccctcatttattatcattattttagttccataaataaaaacaatgcattctagttaagaaagaaaaaaacagcgagagaaacatcacacaccagggcctgttgggggatggggggaaaggggagggagagcattaggacaaatacctaatgcatgtggggcttaaaacctagatgacaggttgatgggtgcagcaaaccaccacggcacatgtatacctatgcaacaaacctgcacgttctgcaaatgtatcccagaatttaaagtaaaaagaaagaaagaaaaaaaaaaacatagaaaaacacttccccaccaccaattccaatgttcctttcctcttcagtgacaacctctgcttcttgttggctgtttagcttccagacttttatctacgcatttacatacatgtagaggtaaacacaaaaccatgttattattttaaaaaggaatgtactctgcgattctgaaagaatgtcttggggatctctccatgttaattcatgcacatcaccccagtttcaaattgctgagtaaggatgtgtcttcctctttgagattcaggctcagagaagagtttgtcagacacacacagcaagttagaagagctgggactccaacctactctcctagtcccaggcctgggcgcaccctgcttgagcatgtccaccactgaatgaggggcagggccacgcccaggccctttttttctgcagaatacagtgggcaggtccagccctgcccctgggagaagaccagcctgggcttgggtgcaccggacccaggaggaagtccacaaagcgcttcctcttttcttagcctccagagacactgggggaagagaagggggtgttgtgaaactgaacagtcccccaacccccctggggggacccgtcagctgggggtggccatgcagctgggggcagaaaaacaatttcatggactcccccagcactgcccccgccccacccccgtccccacccagtctcaccccgcccctgagcaggaggtctgctgcctctaggatggtacttggggtaggtaagcttggaaggcatccataggccagccttgtacagtcttgcccgagtcctacatgagctggccccagtgcctatcagctgctgccgccacttccagcctcctcttccaaatatggtatctgcctggggcttcaggcaccaacaacatggaaatgtttgcagttcctcaaacaggtcagactgtttccctctcaagcctttgtcaggttgtcccttctgtctggaacaccctttgccctgatcttcctctggcatccattaagcctcaactcatgtcacttttttttttttttaaggcaggtctcactccattgcccagtctggagtgcagtggcgcgatctcagctcactgcaacctctgcctgcaggattcaagcaattctcctgcctcagcttcccgagtaactgggattacaggtgcccgccatcacgcctggctaatttttagtagagacaggatttcgccatgttgtccaggctagtctctaactcctgatgtcaggtgatccacccacttcggcctcccaaagtgctgggattacaggcatgagccactgtgcctggcccatatcacctttttcaagaagtccttgctgcactcagtgtccttcctacttggtcctacaatatcatgggcctatctctctctctctctctagcagcattttccactctgtatctaagttattggttaaatgattgtctccataattggattgaaagttgcttgagggccaaaacgctctcatccatttttgtgctcccagaccttggcagaaatgcacatggtaggcccttaatcgtattaatggaattaatcaaagaacgaagggtttagatgccagcactgtcactatcactcactggctgttcctaaactctgagcttcagtttcttcctctgtaaaatgggcatgtgaatagtatctgcacggaatttgcaatatagtagaggagacagagaatcaacaggtgaacatacaaatatgtaacatagtgcctggtggcgacaaattctctggagaaaaataaggccgagtgggagttaaagaagactggaggagggaggagctttctaagggggtcagggaccccctaggggctgttgggcgtttctcaagggttagtctcctctgattttcatttgacctttttgggaaaggtggggagcagtgagctcctgcctgggagggtgtagctatgaaataaacgctggctactttacaaataaaaggggaaatggttgagctctgaaataatgattgtggctctctttcccatccttcaacatgttttgaatatagaacaatcaacagtgatcccaaagaatttgaaatatgaaatgcaaatgccctctggaaataggaaaatacatttttgaaagagccaacctctgacccactgtaaagcgaagcttacattgtgttctagctcctgccctccttccaggacagagccctgggtccctttctgcattctgcatctctctctatactcctcaacttcctgggcacgattactgcattttgtgtaacggttacaaacacagctgtcagaggcacactggaggcatgtccatgtgggttcttcaaatcccagctctggcacttattggctgtgtgaccttgggcaattgcctttacctgtctgagcaacccttttatagtcatccctatttataagacagaaaatgagataatgtaagtgagggcaaccacctggtgcaggaggtactcttattctactatgcaggggaggaaacgggcagagagaacctgcccaaagtcacagctagcgagaggcggtcagtccagcctctgtgcctttgctcccacgctcttccacccctggccccagagtcaagtgcacactcagaacacctttcttgacttttcatcctctaaaaatcccagccagcatcaattctatctcatccatgaagtctctgattgtattttcagttgactttacttgattttgtatagctaatacatttaaatagttcaacattcaagagtacaaaagatactatgcagttcccctccctggaagaaaccactggggctgtttgctatgtgtgcccttcttcacttggcccagccatatgctagtgtgtttgttctattattctgcacaaatagtgaaatacaatagaagctgttggacgcctcaatttcttccctatttacagctatatttttgcattgttctctattagtacataaggggcttcctccttcttttgtaaaaagcatttttattgaattataaatttacgtactatacaattcacctgtttaacttttacaatgcaatggtttttagtatgttcaaatgttgtgcaactgtcaccacaatcaattttagaacattttcattacccacccaccaaaaccaccctgtacctattagcagtcacttcttatttctcctcagctcccagcccaatgcaaccaataatctcctttctttttcttttaagtagagatggaggtctcagcatgatgcccaagctggtcttgaactcctgggttcaagtgatcctcctacctcagcctccagagtggctgggactacaggcatatgccactgtgcccaacctcttttctgtttctatagatttgcctgttctggacctttcatataaattgaattttataatatgtggtattttatgatcagctgttttcatttagcataatgttttcaaggtccgtccatatcatagcctgtatcagtacttcatacctctttattgccaaataatatttcattgggtggatatgccacatttatccattgagggacattgaagttgtttccactgtttggctgttatgaataatgctggtatgaagattttatgtacagatctttgtgtagacatatattttcagatttcttgggtatatacctgggcgtgggattgctgggtcataaggtaattctatgtgtaactttttgatgaactgccagactgtttcccaaagcagctgctccttttacatttccaccatcattgtatgaggtggaatctctccatattctcagcaacaattgttattatctgtctttttaaattatagcagttctaatggatgtgaagtggaatctcattgtggaattgatttgcatttctctaataactaatgatattaagcacctttccatgtgcttattggccatttgtatagcttctttggagaactatctattcagatctcttgcccacttttaagttgtggatttttaaattattgagccatcctatgtatatattcaggaccccagtcccttttcagatctgtgatttgcaaatatttcctcccattctgtgggttgtctttacattttcaggatagtatcacttgcagcacaagttttcaatttcagtgaagtccaatttatctattttttccttttgtcacttgtatcacatctaagaagaatttgcctagcccaaggtcatgaaaatttacttctgtgttttcttctaagagttttacagcatgggtaacatagcgaaaccccttctctaccaaaaatacaaaaaattagccggagtggtggtgtgcgcctgtgatcccaactgctcaggaggctgaggtgggaggatcacttgagcctgggaagtggaggttgtagtggccaagatcgcgccactgcactccaactgggtgacaaagtgaaaccccatcacacacacacacacacacacacacacacacacacacacaaagagttttatagtttttgttcatacacttagatctacgatccattttgggatccaacttcattcttttgcacgtgaatattgagttgttctagcaccatttgttgaaaatactgttttcttccattattgaattgttttggcactctttttgaaaatcaattggccttaaatgtgagggttcatttctcaactctcaattctgtcccattgacctatatttctattcttatgccaataccacactgtcttgattactgtaactttgtagtaagttttggaaatcaggaagtgttagttctgcaactttgttgttcttttcaagattattttggctgttctaggtcccttgcatttccatatgaattttaggaccaacttgtttattcctgccacccccccccaaaaaaaaggcaactggggttttgatagggatagtattgatcagtttggggagtactatcatcaacactattaagttttccaatccatgaacatgagatgtctctctcaacccatgggatgattttatttaggtcttaagtttctttcaaggatgttttcttgctttcagagtatattgtactacttttgttaaatttattcctaagtattttattcttctggtgatattataaataaaattgttttcttaatttcatgttcagattgtttattactagtgtatagagatacatttttttttaaatacagtgtttcgctcttgtggcccaggctggagtgcaatggcgcaatctcggctcactgcaacctccacctcccgggttcaagtgattctcctgcctcagcctcctgagtagctgggattacaggcgcccgccaccacacccagctaatttttgtacttttagtaaagacagggtttcaccaccgtgcccaggtacagttggttgttatatatccttattatttttgacaactgcttagtattcaattattttattaagatttattttcccacgtcccaaatcatgggcatttaggttattttctgtcttttcctagtaaaagaagtgctgcgatgattctcctgtacatactatgaattcttttaggcattctgatgttttctctctctgagctcctttagtcgtcagctgctaccactctgacccaagctcccatcatcttgcccttggatgactctctccctgctcactggtttccctcctttccctttgcccctccaattcattctctacccagcagccagacagatcctgtgaaaagataagccagtttggctcactcctctgttcaaaaccctccaacagggctgggcacagtggttcacacctgtaatcccagcacttttgggaggctgaggcaggtggaccacctgaggtcaggagttcgagaccagcctggctaacatggcaaaaccccatctctagtaaaaatacaaaaattagccaagcgtggtggcgggcgcctgtagtcccagatacctgggaggctgaggcaggagaatcacttaaacctaggcggtggaggttgcagtgagccgagatcgtgccactgtacaccctgggcgacagagtgagactctgtctcaaaacaaacaaacaaaaccctccaacagctcccatcttgtgtcaattaaaatttaatatcgataccaagatgtctgtggccttcacaatatgaccccacttactacctctccaacactgtctccaccactcttgtctgcaccctctgtgttccagccacaatgggctctttgtattccctaaacacaccacgtgctgttgcctctcaggacctttgctgttactggtgcttctgcttggaacacaattcctccagattatcacatgacttatctctccaattcaaaaggtcttgctcacatgccacctcctcagagaagccttctctgaccaccctgtctcaagttacaccatcgctcctctccatcccactacctctccccttgacctccctagttttcttataacccatatcattcccaaacatgggatgagttttcagtatctgtttattatccatcttcccctcaataatgtaaattctaagcacataggaaggaattaattttgtttattactgtatcctcagcatcaataatagcacatggcacatagtaggtgctccataaatatttgttgagtgaatgaattatcatgccactcccctgtttataaccatccaatagcgtcccatgtatgttagaataaaacctatgctcctcacagaggcctgcaaggtcctgagtggcctggccaatttcatggacctcaccttgggtctccctcctctgctagacacaatggggttcttcagacacacaaagcacctactttccttgaggcttttgtgtattgtattggttatcaagattgcataataaactaccccgaagcttaaaggcttgaaacaataagaatttattggcagggcacggtttctcatgcctgtaatcccagcactttgggaggctgaggtcggtggattacctgaggtcaggagttcgagaccagtctggccaacatggtgaaaccctgtctctactaaaaatacaaaaactagccaggtgtggtgtcaggcacctgtaatcccagctactcgggaggctgaggcaggagaatcacttgaacctgggaggcggaggtcacagtgagctgagattgcgcctctgcactccagcctgggcaacagagtgagaatctgtctccaaaaaaaaaaaaaaaaaaaaaaaaagatattacctgttctggggaggcttccctaccttcccctgttaacctgtcaaagcccctgcatggagccccaccccttgatagtgcttgttgcaaaattccaacctgcccttattggtgcaaccatttgtccaatgccctccagtaagtggaaaatgccatgaggccagggatttcggctccctcattctctgttgtgttccctaacactcaagactcattacccagtatgtgcccattattatgtttgttgaccaaatgagagaatcagagacatcaaatggcttgctcaaggctacacgtctagaggtggaaggagcactagaatctgggccttgttactcctgatctagaattggcctcctgccccaggactcacttggttctccagacttcagtcacagcaaagtccaccctcatttcagagttccttttattccatgttgaaaagggtccactacccacagggcaatgtctcctttttaaagtcatatgctccttcttttatctttggaacaaggcagagtgacaaaggtgatttccaaattatacttgaatcagtgcctaagcagcagtttgaaatcttaatgattaggctgtactaatgaaattgaccatctatatatagcaaacctaagcactttacttatatttcattctcaaaatgacccactgaggtaagtagtagtattattccgacttgacagatgaggaaactgagactcaaagaggtgacaatcaagtcacctctttgtacaacattacccagttgataacagcagtgccaggtttgaactctagttggactcctacgatggagcatttagcaccagtcttttgtttttgtttttgtttttgtttttgtttttttttgaggagttttgctttgtcccccaggctggagtacagtggtacgatctcggctgtctgcagcctccgtctcccaggttcaagcaattctcctgcctcagcctcccaagtagctgggattacaggcacccactaccacacccggctaatttttgtatttttagtagagacggagtttcaccatgttggccaggctggtctcgaactcctgacctcaggtgatctgcccaccttggcctcccaatgtcctgggattacaggtgtaagccaccacacctggcccttagcaccacttttgtggtcagctatagtctccatgacaatgaatgaatgaataattgagtagacaaaatgtttgccacccccaaagactggtaagggggtgttttagaatacaatttgtaattgtataaatgttatttggtgcaaatatgggttagatgggaactttttttaattgaaaagaatgataatgccaaatgttggcaaggatgtggagcaattggaaatcataaatcactggagggaatgcaaaatggtgtaaccacttcaaaaaccaatttagaccaggcacaaaggctcacacctgtaatcccagcactttgggaggctgaggcaggcagatggcttgagcacaggagttcaagaccagcctgggcaacacggtgagactgtatctctacaaaaaaaaaaaaaataagctgggcatggtggtgtacctgtagtcccagctactcagaggctgaggtgggaggatcacttgagctcaggagacagaggttaaaatgagccaagatctcgccattgcactccagcctgggtgacagagcaagaccctgcctcaaaaaaaaaaaaaaaagaaaaacaattcagcaatttattgcaagttagacacacacttgctatatgacccagcaattccaatcctaagtatttacccgagagaaataaaaatatgcctacacaaaaacttgtacataaatatttatagcagctttatttatatagccccaaattgaaaacaacccaaatgtctctcaacaaataaatggataaacaaatagtgttacatctatactatggaatactactcagcagtaaaaatgaacgaactactggaacatgcaacaacatggaaaatctctgagtaaaagaagacaaacacaaaagaaacatactgtatgactgcatttatgagaaattctagaaaagacaaagctaatgtataatggcaaaaagccaattggtgcttacctaaggctacctaagtgtgggaggagttgactgcaataggacataagggaactttttggggtgatagaaatgttctatatcttgattggggtggtggttacacaggtatatatatttgccaaaactcatcaagctgaatatttatgatggtagattttattcacgaaattatgtcacgataaagttgacagaagctttgggaacatacacaaggatttcaattacagcattactgtcaggacaaaacatttgggaaactgtccatgaacaggaacatgtgtcagctctctggctctttactatcagaatggcaaacttttgaaaggagatgtagctgatgctaatgcggaccctccgatgccccctgggccttaagtaagagctgcacttctcttcctggagaccctctggtggctgaagcatgcaccagggaggccaaaatgctggaaggtcagtacccctggagtacccctcatccggtgtccaacaggagttggtgtgtaaatgccccagctccctcgcctgacaggtggagtaaccctgaagtgggtatatctccagagatccctgcagaattgaactccagttgcccacaatggtaactggcttcatgatattcctttttactggcttccctcccttccctgtctcatccacctactcccctaccagtgtcttctgcatctcctaaataaactattttcacttggatccatgtccagggtctgcttctggggaactcaaattaagaccagtggataataccaagggttggtaaagataaggggaaatgatgggagaaagagtggggcagtggcgattctgcaaacacctgtcattcttggcaaagcaagtacttaacaaaattctaatgtaggacgataaggggacgtgtatgaggatgtccactgtggcactatttacactagtgggaaattgtgtgcaatctaggtgtccatgactaggagaatggataaataaaatgtgaaggatgtaaacagtgactacacgtacagccgctacctttggcaacatggctggatattaacaacagtgatgggggtggcgggagggaatgtacaaaagtgaataagtaacattaaacatacattcagaacattatctgtttttataaaaagcacatacagactaggtgcaatgactcacacctataatcccagtactttgggaggccaaggcaggaggttcagttgagccccggagttcaagactagcctgggcaatacagcaagaccccatctctatttttttttaagttgtctatgccataccacaccgaacacatctgatcttgtctgatcttggaagctaagcaggatcaagcctggttagtacttggatgggagaccccctcaaaatagttagcactgtaggctaaagagaaggaaaaaaggcccatacaggtacatataccaaaaacataagagtagggtcattgtctttctcattcatggttcttccccccttccccaccaggggacattttacaaatgtctggagacattttgttgtcacaactagggaggaggatgctatagacaactagtgggtagagcccaggaatgctgttaaacatcctatcattcacaggacagtcccccgcaacaaagaattacctggcccaaatgtcaatagtgccaaatttaagaacccctgcattccccagcccccaggacagctttgctgaatgaattatgaatgaatgaatgaagaaatgactgtggtcctgatcagctggtagcaacgggaatagagagacgcggtagaattcttgtagttttggagattttggaggtgtgttacacagcatttagggtgatagcccctgtcttttccaggagagggtgtgttctgcccttgcctggagctgggcacaatcccatccacttggggcctcagtcaccctccagcccgactcctcccctcccccgaccacctcccccagcttgggagtcctctgagctgccaggaagccagggtggttccttcgggcagggaactttgcatggccatggtggttccttcgagagaggaactttgcatggtgtctgaatggagcaggcctgcggaagagaaaccgctgaccacagacctgcctggaagtctcgggccgcggagttggggagggccgggccagaagggaggggtcggagtggtggggaaaagagatcacgatgcttccggggtagggtaaggcctttccagggtgggttggaatctttgaagactgtggcaggaatcccttgataggtggggttaggatctctgaagggcagggttggaatctttggaccggcggtatagacccctgggtattaaaactcttaggcggcgggaggttagatcgcgcaggagcaggagcggtattggaaccctggggtttgtgttctaaatcttagggcagggttagaatccactgaagtgagagttcggatccttccactgggcagattagaatctttgggggcaagttgagtttaaaaatccttcagaggtgggattaaaaatcctttggcggggcggggttagtatcttgggagccttggagcgggtgctggggttcttagacgggcgggttcgaatccctaggagtgggatttgggatcctttggagactggggtaggacgctgggcggtgggatggggaggtgttagggaaagtggagcggaagggatgggggttcgcatccttggtggacgcgttagaagcctcctatggatggtgctaatattttttttctcttcgtggagggtttgggatccttcttgcaggagacggaggttatgaccctcggggagccggttaggatcctggggtggcgtctgaatcttcggggaggtgttaggacacttggggcggagttagcctcgctcagggcgcggctaaggcgcccagatggcctgcgggcgccaccacgtccctggtcccagctcgggagcacatcagaggcttagaggcgagtgggaagggactcagacagtgcaggacgagaaacgcccgcggcaccaaagcccctcagagcgtcgcccccgcctctagttctagaaagtcagtttcccggcactggcaccccggaacctcaggggctgccgagctgggggggcgctcaagctgcgaggatccgggctgcccgcgagacgaggagcgggcgcccaggtgagtgccgcgcacaggggaccgggaatacccggcccgcgaggggtcccaggaggcggagggagcccaggagcctggggagggctggctacgggtgcggctgggggcagcgaggggagacggaacgtcgggggagccgcgggtagcccgggggatgaggggtcgacagcgagtggagggtgccctagggaggggcggcactgttgcggactgctggattcccggggaaggggacgctcgggcccgtgcagtgactttatccaccacttctctgggccgtccaggttccccttcttgggggggggcggggattttttttttaatttaaaaaagaaaaagaaggaagggatggggcttcacagaacccgggaaggggaaggcccttacggttcccggtgggggccgggtcacgccgggttggcagccagcttggggaagggggtagttgggcggaggcgtgacgtgcgagccacacccaggccggctgcagctggtcggctctctgcccctcctcccacaacaggtctaggtcaaacccccaaacctcctggccccagaccacactgcatgcatgccctgtctctttcctccttggacgaattctccgcctccgaattcgtttcctcatctgtaaaacggggctatgaagtctttcttgcaaggatgcaggaaattggagtatgcgagaggtggtgcgtgtgagagacaggctagtgggtagcggagggggcttctaggggcaaactgcctgttggggctggggtagaggatttggcctttctttgcctctgttttcacaactgcaggatggggagagtaatagtacctccttcacagggttgtttagaggattaattgggtactgaaggggccgggcagggtggcacacgcctgtaatctcagctttttgggaggccgaggcaggtggatctcttgaggtctagagtttgagaccagcctggccaacatggtgaaaccccgtctctactaaaagtacaaaaattagccgggcgtagtagcacacacctttaatcccagctactcgggaggctgaggcacgagaatcacttgaacctgggaggtggaggttgcggtgagccgagatcgcgccactgcactccagcctgggcgacagagagagactctgtctcaaaaaaaaaaaaaaaaaaaaaaaagttactgaaggaaagctttgagaatgctgtctgacagtacacaggcttaatgtatgttaacattgccctagctagacatatggccccgtgttctcagactttagcctacatcagcatcacctggactgcttgtgaaaacagattgctgggccgaatcctagagtttctgattcagtagctctgtgcaggacaatgagaacttccatccccggtgatgctgctgctgctgatccaaggaggacactttgagaaccactggggtagcctatgcctggcacagagaaaggcctcaatgcctatcagttgccttatcccatggttttctctttatggtccttttttttttaggggagggggtgacaggttaaaatacagaaaagtgaagataataatatattagatgtcccgagaatccaccatccagaattaacaaataatagcattttgttgtgtttgttttgagattttaaaaaattaatttactaaaagtaacagaaaaaattgaagtctccccaccttgtatcactctcagtcctgtttctctccctccccaggggcaaccgctgtcatgagttacagtccttccaggatgtgcctctgaaaatggattgcatataaatgtacgcataaacaacacgtaggattgttttgtgtgctttaaaaatgctatctatgcagtggttcatgcctgtaatcccagctactcgggaggctgaggcaggagaatcgcttgaacccggggaagcagaagtcgcagtgagccgagatcgcgccattgcactccagcctggacaacaaaagcgaaactccacctaaaaaaaaaaaaaaaaaaaaaaaaaaaaaaaaaaaaaaaaaaaaaaaaagcccggacgcgggggctcacgcctgtaatcccagcactttgggaggctgagccgggcggatcacgaggtcaggagatcgagaccatcctggctaacacggggaaaccccgtctctactaaaaatacaaaaaattagccgggcatggtggcgggcgcctgtagtcccagctactggggaggctgaggcaggagaatggcgtgaaccctggaggtggagcttgcagtgagccgagatcgtgccactgcactctagcctgggccacagagcgagactccgtctcaaaacaaaacaaaacaaaaaactatctaattgtgagacttttctgcaattctgacaatggggatagcagaggagcatatttgccccatcttatcattaagttgtcaaaatctacccaggatgagaaatagaaaatagaggcctcattcattccttccagctgctgtggagtatcccagcaggtaacgactctacagtatttctctttcccctgtggataaatactcaagttgttcctaggcgttcactacaacgaacaatattgacaggagcatcctggatgtgtagctttcggcccatgtacaggtggttcttgaggaaaacaccaaaaggctggatggctccccagagagggcacctgtcacactcccctttgtgtgagaggagtactgtagcccagaagggtcaccagggactctggggcagagaagagagaagaatgttgctctgctgatctcccagccgtctctggatcaatggcctttctttcaggcctcatgttctctgctgtaaggcacttcacttgccttactcactatgcctggcacttaataagtgttcaagaaaatggaagcatgaaccttttgagggaacaataaccaatattttcatgtatctttatgtagtcttttctatgcacttttaaattaacataattagtataatgctacacatagattatttttatcctatttatttgcttagtattacattgtagcattttccaggtcattaaaatgttcttaaatttttagtggctgcataatattccactgtttgcctgtattataatttgcttaacctttctagcagagcaatcttttatatagttcaaaatttttagaaatattttaatcgaggtgaaattcacataactttataaaattaactatatgatttttaaagcgaacaattcagtggtatttggtatattcacaatgttgtacaaacactacctgtcagtagctcctaaacatttccatcacccctgaaaaaggaaactttgtacccattaagcaattaccccccattcccccggcccctggcaaccaccaatctgctttttgcctctacggactaatttattcaggatatttaacataaatagaagcatactatgtgactttctgtgtctagcttcttccacttaacataatgttttccaaggttcatccacatggtggcaactattagtactttattccctttgtggccaaataatattccattgtatggatattccacagtttatttacccatttatccacagatggaaattcaggttgtttccacattttgaccattgaaaataatactgctatgagcatgcatgtgcatacatgtatttgtttgagcacctgttttcaattcctttgggtatatacctgaagtagagttactgggtcatataaaagttctatctctgtggccgggtgcggtggctcacgcctgtaatcccagcactctgggaggctgaggcgggcggatcacgaggtcaggagatggagatcatcccggttaacacggtgaaacctcgtctctactaaaaaaatacaaaaaaattagccgggcattgtggtgggcgcctgtagtcccagctactcgggaggctgaggcaggagaatggcatgaacccgggaggcggagcttgcagtgagccgagatcgagccactgcactctagcctgggcgacagagcgagactccttctcagaaaaaaaaaaaacagtagttctatctttaactttttgaggaactgctatgctgttttccaccattttacattcccaccgtaatatacaagggtttcaattggcttcacatccttgccaatgcctactatgtttatattttattagtattattattaccattctaatgggtacagaaagcacgaatcttaatctcattcaaaccaggctgccctctgagggctcttacctcagaaagtaaggagaaagttgtctacattctaaggactagccagggcttggactttaaactcttctagaaagtaaattctacaagagcacaaacatgtttgtcctataaaccactgtatcttctaacacctggcacctggcacatagtagggcctcaaaaaaacactgatgggacaaacgcaatgaatgttggacaacctcctccctcccttgcctgagatatttcagctgccctccccgaacacccctccacccgcagcgattatttttaattagttgctaacatttaaactcaggagagctcacataatctggatttctgtctcctaaaacattagaagagttagcagccctgagactagaacccacgactccagtgctcttcagacaacctcagtggagctgggggctgccctgggggctacacctgggctgtccagcttgcacagcccttgccaggcccactttcctcatccgcagaaccctccacatccctatagtcatttgagttttcaaaccccacccttcgggtcatgacaaggcttccttttttatagaaaaggaacatgaagggctgggtgcggtggctcaccctgtaatcccagcactttgggaggccgagacaggcagatcatctgagctcaggagttcgagaccagcctgggtaacatggcaaaaccctgtctctacaaaaagtacaaaaattagctgggtgtggtggcacatggctgtagtaccagctactcaggaggctgaggtgggaggatcgtctgagcacagaaggtgaaggttgcagtgatctgagactgcaccactgtactccagcctgggtgacagagcaagaccctgtctcataaaaagaaaagaaaaggaatgtgaagcctagagagggtaattgactttcccaaagtcacacagcaagttagtagcacaatctctctcagcctctttctttcttacatctttttgttgttgtttatttttctttttttataccacaagtcatcaagcaatcacttctgcctttctaaacaaaccccaccacatgcaccaaccacatgttggtccccaccccatttctccagtttcctcccccacaggactgggagtttgaaggtactttcagaggcgtgggtaatgatgcagaagcagcctgtgcttaagtgtaaatgtgccctggtcttggccccggctgtggtcccacatgctgcatcctctggatggcactgcgctaggacgtgcgctcctgactctcccttcgagtcacctccctgagttccaggcatcaccctgaaatcctttggcccaggagatgtaagtgcagccaagagaacaggaatcccagcctcatctctaccatagaaatgaagaacagtgggtacagtacagtagacgaccccgagtctgagtgccagctctgccaaagacaggttgtgatgcactaggcaaatctcttccctttctgagcctcagttcccaaatccaaaaaaaaaatggaactgaggctgggcacggtggctcacacctgtaatcccagcactttgggaggacaaagcaggtggatcacctgaggtcaggagttcaagaccagcctggccaacatggtgaaaccccgtctctactaaaaatgcaaaaattagccgggcgtggtggcgggcgcctgtaatttcagctacttgggaagccgaggcaggagaattgctggaacccgggaggcacggttgcagtgagccaaggtcttgccactgcactccagcctgggctgacaacagcaagactctgtcaaaaaaaaaaaaaagggggagaactgaggaggatactactcatgattcctgcagcacaattccttttatgtcaaaacacacacacacacacacacacacacacacacacatacacacactagtccatcatggcgtatatgtcttagtttgagtttctccagaagcagaccctaggcaaggtttcaaatgcaaatagtttgagagctgattccagagaccctcctaggggagtaaggaagtgaggcagggaacaggaggtagtcattaaaggtgtcttctaagcccagttaccactgcgggcacctggagctcaatcccactgaggagctctgggagccagggtagaacaggcttgagaggtgagggaaccggggtatttgtccaccctgttctcgctcctgtcttttgttgaaaactactcctggggatgtgataattctctagcactttcggcttgccaagcccatgggcagagcaggcaccaatagccacagagaaatctctcagacaaagagatgaaggtgccggcagctggaagtccagccagaatgtgcagaaatggtaaagggcagagtgatagaggcagggcactgacagcctctgcttcaacatacatgtgtgtaaatgcagaggcagaggctgaggccaaatgctggcagaggatatctgggtggggaaagaggtggccatggagggcttatagaatgagtaatccaagagtgtcttaaatgtatctgtaatgttttaatcttccttccttccttccctccctccctcctttcttttcttttctttcttctttcccttctttccttccccccttctcctcctcctcttcctcctcctccactttcttcttctcttccttcctttcttctttctctctctctctttctttcttttttctttctttctttctttcttctttcccttcctcctcctcctccttcttcttctttcttgcttctctctctctctctcttttttttttctttttctttttgagacagggtctcgctctgtctcccaggctggagtgcagtgatgctatcatggctcatgcagccccaacctcctgcgctcaagcgatcctcccacctcagcctcctgagtagctgggatcacaggcacatgccaccacacccagctaataaaaaaaaattctggtagaaatggggtcttgccatgttgcccaggctggtcttaaattcctcggctcaaacgatcctcctgtcttgacctctcaaagtgctggtattacagatgtgagccaccatacctggcctctaatggtttaatttttaacaagaaggatgcactaatgttttactaggtggtaaaaggtcattttaaaaataaaatacatacccttcaaaaaataaaagaaactgagacctggagctttgtcaattataaaaaaaatgtaaaaggatcagcgcctgtgttactgaggctttgaggattccatttgtggaggacaggtttgggggcagctgatctctcagtaccacggcaggttaaagtgaaaagtggccctggtggtgaactggccaccatgtcctgtctggagggggaaacttccactcagcggcagccaaggaaagactgctcctctcccagcagaagcgagcaaatgtgcatcacccttctcagtttaaacatatatttatagctattggttttctttttgtttgtttgtttttgttttgagacaggatctcactctgttgcccaggctggagtgcagtggggcaatcttggctcactgcaacctctgcctcttgagttcaagcaattctcctgccttagcctcccaagtagctgggattacaggcacccactaccacgcccagctaatttttgtatttttggttgagacagggtttcaccatgttggccaggcttgtctcaaactcctgacatcaggtgatccgcctgctgacctcaggtgatccgcctgcctcagcttcccaaagtgctgggattgcaggcatgagccattgcacctggcctatttatagctattgtttagacgggaaatctgggggcatccagcagactaaatggggaccttactgtcatatctcatatcctattggtcagatggataataaacaaatcaacaggtaatacattaggtgcattagtccaggtccttttttattttttcttttctttttcatacttaacttcagcataccctgagatagttcaagtcctttgagaagcagactcccatagcattaaatgtgcaagaaatttattggaggaaatggctatgagagaaaatgggaagaaaccaggagaggacaggagagccatcagatagtggggtacctctgtccactaatgaaaaagaaaaggaaggaagaaaggaaggaagaagaaaggaataaaaggaggacgtgtcttggactgccatgccgtattttttttttgtagttgttgttctgttttattttgttttttttgagacagagtcttgctctgttgcccaggctggagtgcagtggcgcagtcttggctcactgcaacctccgcctcccgggttcaagcaattctccttcctcagcctcctgagtagctaggattacaagcatgcgccaccacgcccagctaatttttgtatttttagtagagacggggtttcaccatgttggccaggctggtcttgaactcctgaccttgtgattcgcccgccttggcctcccaaagtgctgggattacaggcgtgagccactgcgcccagctgccgtgccattctaaggaaagtttgtcaaggctgttaaggagcccttggccaaagtctcttgacagaggtcccccagacatgggtgggcttcggtctccctgccacactcagtcattggctgggagcagcccatgagagcagtgatggacttcagagcacagcagctgagccgctgatcaatttctccagtcgtactcctgcagttggagatctgagaggtgcatcctcatggccaccacgtttaagaggtggttaggggcatgaagactagctgggaacaggctagacagtgatgggagttggggggcagaggatcctgtctttgccagggtgatgagggaaggttgctctgagaaggtacaatcattagagagactgaaggaagtgatggagcctttctgggtgaagaatattccagaaacagaacatgcaatgccccagaggtataagcacagttggtgagttgaagaagagcaaggagggctccagtggaatgatcaagggagagttagaaggagacagatctgagaggctgaggaggggatcagattgtggaggtcttacccaccttggagaggacttgggcttttactccaagtgagacggaaaccctgggtgggggttgagcagagaaggaatgcgatctgacttacctttttttttttttttttttttgagacggactctcactctgttgcccaggctggactgcagtggtgcgacctcggctccctgcaacctctgactctggggttcaagcgattctcctgcctcagcctcctaagtagctgggattacaggcatgcgccaccatgcccgcctaatttttgtatttttagtagagatggggtttcaccatgttggtcaggctggtctccaactcctgacctcaggtgatctgcccgcttcagcctcccaaagtgctgggattacaggtgtgagccaccatgcccaggatgacttacatttttaaaggctcacttatttgtaagaggcagaatgcagattcaaacccagctctatctgacttcaaatctcatgctctattttcaaactgccctgcctcctgcctgccttagagataaaatcattccaagaaggttcacagttgctctggaattctgaaattgaccaagtgtcccaagagtaacattgaacatgctatgagttttatatgtggttgaataagtgtttggaacacaggcatctcagagccagccctatggctcagccaggcaaatgatcaaagccctgagttctcctttagtgtgttgctctgtcgctcgccatcgtgtgagccagggcccacgcagcctcttggggttgttactccacctgtccaatgaagattttgatctcccaagtttcctcctgtttgcaaaatcaaagttttgagctctatgagaaagaagctgaggctcagtaaagggaagacgtgagaagtcaggagtgacccctaactgtctattagggacagtagtcactcggggataaagacagttcattcagaagacagtcagggaacccgaggagagggagctgctgggctctgcacccccaaggcactgctcagggaattggctcctgttgaggaaatactttttccccacccccattgctgagctgttctgagaagggaaagttcctgtaactgaacagccttaagccctgggcccccagcggtctgccttcttgagagttctgtttgggttcctcattctccccttccccttcatcgcccacagcctctggggctgacctcagtggatgatgacaggcaggagagctgagtgccagtttgacctaccactgactagccgggggacccactctcccatgggcttccatttccctatctgaaaaataacttcataattctggtctgttgacttcagccaagtatgatgaggtccatagagagtagaacataatatatccattacacgaatgtgtatggggggcctattagataccaggtgcttctttttttgaaacattcttgctctgtaacccaggctggagtgcagtggcatgactacaactcattgtagcctcaacctcccaggctcaagtgatcctcccacctcagcctcccaagtagctgggaatacaggcacatgccgccatgcctggctaatttttttgggtagagacagggtctcgatatgttgtcaggaccagccttgtactcctgggctcaaagcaatcctcccacctcagcctccaaaagtgctgggattacaggcatgagcccctgcacccagtctctataaccaggtccttttaaggcatggcttcagtgccatcagcttaatgaggtccatattcctcccatcctcacctactctaataggtctagtaccatcttaccttctcttctaccaaaacctggtatcagggaggtctttgccatcagccatttgcacttgagtgcaaatcacaatcccttataagaattccctctgcactgggcaagactctttgatgtttaaagggaaataaatccaactcaaaactggctcaagcagaagaaggaggttactggaaaatccctgagatatcagcttcaggcgaggcttaatccaaggctgagagtctgcatttctctatttcttgggtttgccttgctgctgcaggcctttttttccagctagaaaccaagggctggctctcgttggccagaattgaatcacatgcccatctctacttctttttttttttttttttttttttttttttgagatagagtctctctctgtcacccaggctggagtgcaatggcgcaatctcggctcactgcaacctccacctcccaggttcaagcaattctccagcctcagcctcccaagtagctgggattacagatgcctgccaccaagcccggctaattttttgtatttttaatagagatggggtttcaccatgttggacaaactcctgacctctggtgatccacctgcctctgcctcccaaagtgctgggattacaggcatgagccaccgcgcccatccacccatctctgcttctattactgcaactctcattggcttgatttggtcacagatccacctctacagccaggggttggagtcaactctatcccaatccataaactgagactaggggcggagtaattcccaaaggaaaattggagaactgttgttagaagaaggggggaatggattctatgcaggaaagagctgcagcttcttctttcagagaacttctaatccaacatctcatttcacatttggagaaactgaggctcagagacaagttgagacttgcctaacatcacacaatgagcttatagcagagatgggaccacaatccagggcttcacaccctcagcccttgcaggtttctgcttaagcatagaagctcccagaaaaccatctccagcccactggatggatgctcaggcaggccccggcctctcccccttgagcttgactctgagagcacaggccgagtctctgagttttccacagccagcatggtaaccctgggaagcagccaggcacaagcaagctgacctctctcatttcactcagcagaggctgaggcggtgaggagcaggtttcaggttcccagggacggcagtggcccgaggaagtatctttaccagggatcagcagttttgagtgggtgtgcaaccaggcagactgcttctgctctcagagcgtgcttttgaagcacattagatgagaaatgcgtatgcagaagttttatacagtccttcacatccctagtcacataggacctcaggccaagcctgagaagcaaggcctcctatttagcaggaaagaaaaataaggctcagagagggcaaatgacttgctcaaggtcacatacccagtcagtggcagaactgctatccaaactcaagtattctgactcccaagttcagccttcattctgctacattggtggatctcaaattttagtgtatatactaatttcctgtagaattgttagaactacagattccaggacctcactcccagatactggttcattcaatccagagtgtgacccaagaatatgcaagaatcagtggagactttttgagttcaaatggcagaaacccaactcaaattggcttaagcaaaattgataatttatttgctcgtggactggaaaaatcctgaggtgtataggcctcaggcatagctggatccaggtgctcaatttatcttcaggaattactttatctccatacctcagctctgttgtcctctctggtggcttcactctaaagcagcttttaccttgatgatgttgaggtggcctccaagaactccaggttcctacatctcaacaatccttatagaaagagggtgctttttccctaatttttgcagcaaaatcccagggcagactgcctcagtgaggaggacgtatatgcctacaactgaaccaatctctgtagccagggggccagaggatatgggattctctgattggccaggcctgtgtcaagttgccaattcctgaaggcaagggtgggatcggccccaccaaacttcatgcactaagtgggagaaagctggttctccaaaggaaaatccaggtactgttatctgaagagggacagatgctgaggaggcaggagcaaaagaggttctctagccttcttggctagaatgttcacatgaatcgcctgggaaccttgttaaaatgcacattctgatttgggaagtggggactgagattctgcatttcttacagctcccctgtgaggttgaggctgctggttctcacgctagccacactctgagcaccatattgcatttctaaactcactcaaaccactttgtcacaaggcactctgcagagaggccctgggctacataaacctctttcttccaccattctctccccaccttcaccccatcccctgttcccaaactcacccgaataatatcagcaccatctgtttgggaaccactcaccaacatactatagattctgctgacaaatcacagttgaagaaattgtccattgtgccctccagtgacttttttttttttttttttttttttttttgacagagtcttgctctgtttcccaggctggagtgcagtggcacgatcttggctcactgcaacctctgcttcccgggttcaagcgattctcctacctcagcctcccaagtagctgggattacaggtgtgcgccgccacacctggctaattttttctgttttcggtagagtcagggtttcatcatattggccaggcttgtctcgaactcctgacctcaagtgatccacccacatcagcctcctaaagtgctaggattacaggcatgagccactgcacccagccccagtgacctttttatgaggagccacagaacaaattctcttttgaatttatactcaaaaaatatttgtttctgtcaacagacaatttgttgtgcttcctgggatcttatggtgatgttgtacaagtttccatttttatcttggctactaggaagctcagagataaatctagtactcaatggtagtagcagtcccaccctgggcttctggttcaataatctttcccttctatatggtgtagagtaaccctttttgagtcttgcagtgctctgtgtatggtttaatattataagctccttcaaatcctttttggaagtcggttcttctttggagtattcttgactttcccccaatctttatctattcagatcctccctgttcttcaaaacccaactcattatcttgctgctcaattattattgtaaacaggttgctttttatacgaacttactaacatacacgtaggcacataaattcattttagaagagtggtttgatgtacatgtttgcagtttgcatttttcacccaataagtattttagcaatctttgcatggcccctcctatgtttaccactccctagtagcttatttttctttcattcttaaaactgtggtaaaatatgcataacaaattttccatcctaatcatttgcaagtgtacacttcagtggtattcaatccattcagcatgttgtgcaaccctcaccaccatccatctccataactcatttcatctgaaactctacacccattgaacaccactaactcctcacttccccttcccccagcccctggcaaccaccattctactttttgtatctcctaatagcttcttagtatgtggcttcggaatgtaattgtgtgtccagtctccccttctcaactcggtcatagagcaggaatgtcctgatgcttttactttttttttttttttttttttgccccgtcttatggtgctcagacacttttacttcctactacataaagtatggcacgccaggcatgcagccattcactcactgtgcatgacactcctactgtgtgccaggagacactgggctaagcactgaggaacgcaggtgtgagcaccagcctttcctgtgctgcagtgatgggagcattctgtctctgcatgtttgcatatggtggctctgagccacagacggctgttgagcacagatggagtcatagctgagatgtgctctaacagtaaaatccacactgagatgtgaaggcttagtacaaaaaaaaatgtaaagtatctcattcataatttttatatttattatatgttaataattttgatatattgggtaaaataaatacatcttaaaattaattcacttgtttctttttactttaagaaacctggatgtaaaaatttttttaaaaatgaaaaataggccaggcgcagtggctcacacctgaaatcccagtactttgggaggccaaggaggacggatcacctgaggttgggagttcaagaccagcctgaccaacgtggtgaaaccctgtctctactaaaaaatacaaaaattagccaggcgtagtggcacatgcctgtaatcccagctactcaggaggctgagacaggagaatcacttgaaccctggaggcagaggttgcggtgagtggagatggcaccaccgtactccagcctgggcaacaagagcaaaactccatctcaaaaaaataaataagtaaatgaaaattaaaaaaaaataaaaactaaaaataaatttaaaaggaaaataaaaataaagtaaaatgaaaataatttttttttaaaaaaggaaaaaataaaataaaataaaatttcaattttaatttttaaaaacctggctgtagaaaactttaacttatatttgtggctcacatgacatttctgggcctagtgaccatgaacatggacatttctgatgcccagtccacaccaggcagcagacatggttctctcatttagggagacaatcacattttacacaaatttgactcctgccagtgtatcactttcagaaaaatcacactttcagctgggcatggtggctcatatcccagcactttgggaggccaaggtagcaggatcacttgaggtcaggagttcaagaccagcctgagcaacattgtgagacctgccccccctctctgccccctgtctctacagaatataaattttaaaagattagccaggcatggtagtttgtaactgtagtcccagctactaaggaggctgaggtgggaggatcacttgatcctgggaggtcgaggttgcagtaagctatgattacaccactgcactccagcctgggtgacagagcgagactgtctctgagaaaacaaatcacactttattgtgcaaaaatggaactcatgggaattccctattttaaaaaaagcgaacttctccagtgttgcagtatctctaggcttgtgggccagaggaattgcaaactgtgcttgcttcatgatccggggcagtgtcacgtctgccagtaaacagaaatagttgtggttaatgtttctgcagcgcttactgcatgctgggcacttttacactcatcaacttgctcagtgctcaccaccaccctatgaggtagaacccttgccaccctttctcagagatggccttggattgtgaatgaacacaggtcttctgagacccctccctcgggaccctgtggccatcttgaatatgtacattgatcacgtaagtgaagcatacaaggtgctcaacgcgcatggattggaaatcacaagactcacagctgcagatcagtgggtgcccagagaggtagagtgagctgccctacctcacacagtgctgctcttcccagaacatctttatgctgaccaaaacacacgaaatgtgatataattttatgtcatatatgtcacacaagatgcccgtttaatttcccagaactgtaatacacatttatctcaaagagagatgctggtttcagttttaaatgcatgcaagtacattataaatctgtgcttaattatgataatttttcaaattaatgatccagcactccaagagtctgaatgtgttccttattttatttccaaaagacaaacaaagcaaaaccgctcaagtcttgaggtggcaaatctttcccagttcccaccagaagaggtaaatccttgtaaataaaaggaatcttttttcatttttaaaagtaactcatctaagcctaggagtttggggtttttttccttaaaccacaaatacatgtttattttaacaagataagtataactgagttctaactgctttagaagaaaatggcaattgtgcagagatgagaaaagcaagcacttccttatgtggttgtcacagcctgccttctcagcaaatgtgtgtgcacattttgagaaaagaaatgaaacatttcttccacttttacaattatgttttgactctacttggagtaaatgtgttttgtttaagcatccttaaattaattcaatacagcagcaaagtctgcaagctctacctccaaaatgtcccccaaacctgtccaatgcttacctcctctctgcccccacactaccctgggccaccatcatctcatacctgaacaattttggcagatttctcacagggttccctcccctgctccccactgtccacgcctcactcagccaccggtgggattatttaaagtgcaaattgaatcccatcattctcctgccagaaactttccatcatccttagaataaaatccaaagtccttactggccctacaggatatggtggccttgtcacaaccaccctcttccctgcccatgagcttcagctacactctcctgctttcagtgcctccaacttctctctaagcacatgccagcctcagggcctttgcatttgctgttccctctgcctggaacactcttccctcagagtgtcccctcactggctcctttgtgtcatttagaccgcaggttctgtatccctttctctgacaggccttccccaaatgccctgcctaaaagagccagacctgttgttccccacagcatcctctcttattgtcctcacacttttcattaactcaatttgccctgttatttatttgttggcctgtttattgtctctgtctcccattcggctgcagttgaggtcctgagggcgtgaacttgcttctcttcttcacagtttagaaaagtgcccagtaaatcttggctgtgtaaatggatgaatgaattaccaaacaactcagagagagacagagagaaagagaggaggaagaggaagaggaagaagacgaagaaagaggaggaggagggaggacagaggagggggaaggaggaggaggggaaggaggaggagggggaaggaagaggagggggagcaggaaggaagggagggagggagggagggaaggagttataagcaatttataaattgataccagtaatacggtgccttgacaaactagattgtttgagccatgttatgtgacctcatcttgttatttaatataaaaatggcaatttatcatctgataatactgcagtttttctgtagtgtttgctctgagcctgacactgcactgagtatttccccactgtaggtcatattattgtccccattttgccgatgaagacctgagaggtgggtaggggcaggaaagtggtcagtgaggtgctggtggggtggaggggccaaggatcagctgaggctttctgacctgagagctggcagtgcccacccaacagctctacctgttacatttctgttatcctcatgccatcctctgaataaacatccatcacgctggtccttggtacccacgacaatgacagcttgtcagccctgggccagtgctgtggcacgtggacatggggaagcccagaggtggcaaggatggagtgggttccatgtggggaggataagggtgcatggagctggcaggggagttaagaccgggaaggccagtgggagccagcccgggggcaggggacctggaatgccagcatcagaagacttccccgcatgaggctcttggtaactggggctcacctcccttctgtctgctgcaggatggggtgcatgaagtccaagttcctccaggtcggaggcaatacattctcaaaaactgaaaccagcgccagcccacactgtcctgtgtacgtgccggatcccacatccaccatcaagccggtgagtaggggaggtcccagtttccctgggggctgacggatgctgccccaacattgccctaacagcctcctgtcttcccaaggttgggcagggtgagcttggggtgaaagggagctgactggccaccaacagtgtcctgactcgactctccgggacgcagcgccagccagcatgcataggggcaaagaagtcatctctctttcctgcagcccaggcttggcccctcagcctgagctccaccaaacaggtgtgagtgagcatctcaggcctccggcctgggcagaagcaaaagcagtgctgagaaacgagtgaacagtaatgatagcagctgaagtgacaatgtaatggtagtatcagcagcattgcaaaaatacagtaacaattgtcatactaatagtaccaaccataattgcgtgagtataagaccaagagtagcagcaggaacaacagcaagagttgtaaaaagagaagcagtcatgctaggagaggtatttaccaacttcttttatgtttatacaaagctgactatgaacccagcactgttgtaagcctttacggttattaacaccctaatcctcacaataatcctattgtgtgacacacaaatacattcttcttgaaaataaaaacacaggccaggtgcagtggctcacacttgtactcccagcattttgggaggctgaggcaggaggattacttgagcccaggagttcgaactgcatgagctatgatcacgccactgcactccagcctgggcaatacagggagaccctgtctctttaaaaaaaaaaaaaaaaaaaaaaaaaaagagctgcttagaatgccatagtttaggtgtcacttcccccttgcatggacacttagattgtttcacatacataacagagcctttatttatggaatataaatcactggtgggcctgtgatttctccaaacttagtcggaaaacactgatctggaccgaccccttcactgtgtgttgaggggaggggtcaagcagcatcccccggtacatccaagaccgaaggccgaggtcacagctcaagaaacctggatcctggctgggcacagtggctcactcctgtaatcccagcactttgggaggtcaggagttctagaccagccgggccaacatggtgaaaccccatctctactaaaaatacaaaattagccaggcatggtggcatgcgcctgtaatcccagctacttgggaggctgaggcaggagaatcacttgaacccgagaggtggaggtttcggtgagctgagatcacgccactgcactccagcctgggtgacagagtgagattccatctcaaacaacagcaacaacaaaaaatctggaccattttgtttgctggctctgcccctaatgtgccgtgtggtgccaggcatgtcccctgccgtatgtgggcctcctcccacgacatgcagggctagggtaagatgctcttgggtgtccttctcaacacagaccttccacgggtccccacacattggtcagattcattctcttctctcatttcttccccacaggggcctaatagccacaacagcaacacaccaggaatcagggagggtaagtatctacgagcagatgcagtggagtcatgtgtcctgcagaggactccgctaggttctcccttagcttgaggcataaatcccaaacagtcaaacccctgtcgagaatccccaaaatttcctctgaagtgctttgcgcaggctattgtgtttctagaacgctgtttagtaacatgaacaaaacatatttagctttaaacttgagaatcacacccagcatggtgagacgcctacttatacttggaaccacatatcgatgggtgcggagctgttccaggtgccgggtgagggtcaccaagggctgtggatgcacttagacgaaacctcaccctctgtgtgtctcccttcccagcaggctctgaggacatcatcgtggttgccctgtatgattacgaggccattcaccacgaagacctcagcttccagaagggggaccagatggtggtcctagaggagtgagtccccatcccactccccctaagacagacctgcctcctctactcaactatgtgctcttttgtgcttccataaagaacctgatagatgggctatcttatcctgggtataaatgtctaatgagaagctaatcacaatagtggaggaagggtttgctgtcaacctggatgaaggggattgtgcacttactgagagtgcacgtccagcctgagatgaacaggtgacgctttctcagggaagcctttctagggctcctgcgattaagccaccggctttacctgtggaccaggccccatcgagtcgaccttgcatttggaaatccttggatctctgagtttgccacctcggatctcctacagccttcaccatcatgggtatagtgtccaggatgtgctgaagcccgagaacgggagtggtcatgcctggtcggactcccaagcccactctcccctattctcagccccagctgaaccattctgagtctctataggcacaggaccctgccatgggtatagctaataagaccaaagctgcaagtccagggaaaaggagtggagccagagacccagggctctgggctgtggacagggagattccagaccctcagatgcacagcaggaactgttgtaaggatccctaccctaatcatggccacatgctggggctgacatagtcacagccctgtccttcaccctactggctttctggaggcagggagttttctaggtcaaggctggggagcttgaggagactggagaatgatccttctgtccctaacacctttactccctcatgtccctcagatccggggagtggtggaaggctcgatccctggccacccggaaggagggctacatcccaagcaactatgtcgcccgcgttgactctctggagacagaggagtaagtatcctatttcctaccttccagaaagaggcatgagcaaagccagccttgtttgcaactcaggacgtctgcacacactgtaccactgcctggcacatactcttcccagggctctgggcttggctggctccttctcttccttcaggtttcatccttccagtcagggaagagaggctaaagtgggtcccagctgtgactctgtcttgtggaaacctgttttaatcccttctgaacatgttttactagcaaaacgacctggtttctttggttggttacacgtgcattctctgcctgccctgcaaggaagagagctggtgagagcggggactttgtctgcttctgcatcctcggcacaggctggcatgcagtcagtgctcaataaatattgttgaatgaagcacacggtcttgccaaggagggtttctggagaggtgagacagctcacacctggccagtcgtccctcatttgttgttttgttttgttttgagacagggtctcactctgttgcccaggctggaatgcagtagcaccatcacagctcacttcagcctcagcctccctgggctcagttgatcctcccacctcagcctcccaagtagctgggactacaagtgcgcatcaccatgcccagctaatttttttcttttttgtatttttggtagagagggggtctctctgtgttgcccaggctggtctcaaactcctgggctcaagtgatcttctcgcctcagcctcccaaaatgctgggattataggcctgaaccactgcacctggcccatccctcatttgattcattcgacaagcacatgctcatgactcttcaagccctgtgccagcctaaggggctgtggaaacaaataagatatatccctaccctcaaggagctctccataacccatcgttcttggctgtgggttcttcttgtgtctagcttgactctaaaaatatacttcagtcatccatccatccatccatccattcatccatccatccatccatccatccatccatccatcatccaacagatacctgttgattccctattccagggttagaagatgacttagatggggctccctgctggagatgttctctgtatggtggatgaggttgatgagtaaaaagatgactacattgtggggtggcaatacatcccattaaaaaccagccaatcaaaagttgacaaatgacagtccccattgttttgtctcttctgcctcctctttctagctagatggtattatgggtttgggatgcttgcctgttaaaaatgaaaacgcttaggcttttcccattataaagccacctccttctggctgggcatggtggctcacacctgtaatcccagcacttcgggaggccaaggcacgcagatcacctgaggtcaggagttcgagaccagcctgaccaacaaggtgtaaccccatctctactaaaaatacaaaaaaaattagctgggtgtggtggtgcgtgcctgtagtcccagctactcgggaggctgaggcaggagaatcacttgactccagggggcagaggttgcagtgagctgaaatatcatgccactgcactccagcctgggggacaagagcgatactctgtcaaaaaaaaacaattatgtcaccccttcttagtgatcatggaactgggggctcttagctgtttctctctccttcttccaggctttgccctgggtcatcccatgctctgtttctccactccagggtctgaacacttacagaatccctgggtcacctcatgtagtccttgcagcaaccatggaggaggcgtggctggcattatttctcaaaggcaacataattgctaagtggaaaacgcagggtgtagacaacatgaatggggggttatcatttgcagacaaaggcaaaataacctagatggggggttctcagacatgagcagcaacagcatcacctggattgccggctaacaagtgctttctgggctccactgtcagattccgaatgtgcatttctaacaggttcttgggtgaggcagctgctgctgctgctgctccagggacccagcttgggaaccactgatctaaatacgcatatctggccaggtgtggtggctcacacctgtaatcccagcactttgggaagccgagggaggtggaacacttgaggtcaggagttcaagaccagcctggcctacatggtgataccctgcctctactaaaaatacaaaaattagccaggtgtgatggcgggctcctgtaatcccagctactcagaggctgaggcacgagatttgcttgatctgggaggcagaggttgcagtgagccgagatcacgccactgcactccagcctggacaacagagcgagactctatctcaaaaaataataataaaaataacaaatgaatacacatatgtgtcctttcagggcactcaggggtccttgtgtctgaatcaagaaactgctaacagaggttgcctctggggagcacaactgggaccttgggaatcagggcgggatggaatcttggtttctctcattctcccttgaaataggcaatactttcaaatgtttcaaaatgcaaatgtggggaagcatgcagaagagtgaaaagtcttcttcccaccctgtccccaaccagccacttcccctccccagaagcaaccagtttctcgtgagtcctcccagatgcttcctccttatataagaaaagacatctcttcccgcttatctcacacaagtggtagataccacacacactgttccatgcctctcgttcagaccttccatgcagcaccttgttcctgttttgttttgttttgttttgttttgttttttaggtggagtttctctcttgttgcccaggctggagtgcaatggtgtgatctcggctcactgcaacctccgcctcccgggttcaagcgattctcctgcctcagcctcccaagtagctgggattacaggcatgcgccaccatacctagctaattttgtatttttaatagagacagggtttctccatgttggtcaggctggtctcgaactcctgaactcgtgatcctcctgccttggcctcccaaagtgctgggattacaggcgtgagccactgctcccggacacctccttcctttttataccacagggcgtctgtcctgtagatgtcctaccgtccatttaacctctgccctatacagtggtcacttaagttgtttccagtcatgtactgaagcgaatctcctggtgtatatgtcatttctcccttgtgcaaggtctatgggataacttcctaggaccagaattgtcagggagacagttggttttttttgtttgtttgtttgtttgtttttgagacagagtctcgctctgttgcccaggctggagtgcagtggcgtgatctcggctcactgcaagctccacctcccaggttcacaccattctcctgcctcagcctcccgagtagctgggactacaggctcctgccaccatgctcggctaatttttttttttttttttgtatttttagtcgagacggggtttcaccatgttagccaggatggtctcgaactcctgacctcgtgatccacccgcctcggcctcccaaagtgctgggattacaggtgtgagccaccgcgcccagccgggggagacagttcttagtcttacatagttgaatattttaccatggcacaagtcactttacaacatgaaagcaaagaaggtagatgagcaacatagcatggtgattcagagcttgggttctggagttagactgcctagcttcaaatcctgcctctacaacttcccagctgtgtgactctaggcaagtcacttgccctctctgttcctcaatttcatcatccataaaatggggccaggagcagtggctcatacctgtaatcccatcactttgggaggccaaggtggatggatcacctgagttcaggagttcgagaccagcctggccaacatggtaaaaccccgtctctactaaaaatacaaaaattagctaggtgtagtggtgggtgcctgtaatcccagctgcttgggaggctgaggcaaaataattgcttgaacccgagaagcagaggtttcagtgagcccagatcacaccactgcactccagcctgggtgacagagcaagactcagtctcaaaaaaaaaaaaaaaaaaaaaaagggggggaatgataaaggtgacaactccatagagctgttgggtggatagcaagatagatgttaacttcctccccagttgataacagaggaaccaaaggcccaaagaggaaggcaacttgctcaaagtcacactgcaggtttgtggcagagccaaggcaggctgaggtcaggtctggggcttttttccaactgctcctcaccccagtgaaggtgggaatggattccactgctgctgcttgaacttttccacccaaatatctcaatattcaggaagaatgaagaaaatgtcccaggatataatcctaagtataaaattctttccaatctcacattgtagcttagaagttcaggccaactttatattcaactccatatatgcggaggaggattggttgtaaagctaacaaaactcaggcccttcacaggcttccaaggtcccaagaaggatcttccccgtggtcttgtatgcttgtgaaacctgcaaaagtaagactttgaccacagctggttaagactgctgtctgtttccactctgtcttcctgtccatctccctgtccctcacagcgagcagcactgaaatgacctatcagctttttgcacttgttaatgctgtattatttttcttaaaggaagttcccccactccaaattgcataggcttcagtctcagcaaacaggattcacttcgggtaaaatgtctattttgatatcaaaagaatggctcctttaccttctctcccccaaaaaatctttgagtaaaactgatgctgcaggaagccagaccctctgtatcctgacattcccctgggacctgcatggccacaggcatcctgtgtaggccggacaggactgcatgaccccaggttcacatttgtcccctcccttttccatcaggtggtttttcaagggcatcagccggaaggacgcagagcgccaactgctggctcccggcaacatgctgggctccttcatgatccgggatagcgagaccactaaaggtgacaccagccctccccaccttgtcctccctgccgaggtgccccagctggggctggccaccaccctttccttggaaaatgccctgggaaaggctgaaaaacccaaccaggtgctgtggctgccaggtttctcctgctcttggccacctgagctggggagggttgaggctctgtgcctggctctgcccttcttatccaccatagctgccagcttaggtcagtggaactagtgccaggtggcttaggccctgaaaacaaagaaacatccagctgaagcttgatcttcactgacttgttttttcatttgttttggttcttgttttgttttgttctgttttttgagatggagtctcactctgtcgccaggctggagtgcagtggtgcgatctcggctcactgcaacctccacctcccaggtttgagcgattctcctgcctcagccttccaagtagctgggattacaagtgctcgccaccatgcccagctaatttttgtatttttagtagagacagggtttcaccatgttggccagtatggtctcgatctcctgaccttgcgatccacccctcttgccctcccaaagtgctgagattacaggcgtgagccactgcgcctggcctgttttgttttgtttgagacagggtctcactctgttgcccaggctggtatgcagtggcacaatctcagctcactgcaacttctgcctcctgggctcaaatgattctcccatctcagtctcccgagtagctgggactacaggtacgtgccaccatgctgactaatcttttctttctgtttttctttctttctttttagtagagatggggttttgccatgttgcctaggctggcctcgaacttctggactcaagcaatctgcctacctcagccttccaaagtgtcaggactacaaagtgtcaggattgtttttgttttggtttttttaaatacccgtaacagaccaagtaggggaggccaacacaggaggatcacttaagcccaaaagttcgagaccagcctgggcaacatagtgagaccccatctgtatgaaaaattttaaaaattagccaagcatggtggtgcacatctgtactccctgatactcagaagggtgaggccagatgatctcttgagtccaggagttcaaggctgcagcgagccataatggagccactagactccagcctgggcaacagagcaagaccccatctctaaaaaaataaaacaaaatacccattacaatagatcttatccacaagcctcattcctcctttcctccctccataaggaaatgaggtaggatgaggtcgccagaagagactcaagccagccttctctgggactctgctgaaaatgctccttggaagcttttggaagttttaatgtcaggtgaccagcttcctggaatttctgtgctgcaagggtggattcatgctgattgggtgcatggatggcaagaacaggcctggaaaacatcgcgtagctcaaactggcatcgattgaggctcattgcctcaaaggaatgaacatcagtaggattcttatgatttcagatttcatgtgctaagtgcacctttactaatacatttaggttcacaactgcttgactcaaataagccaagtatattgtataatatgtgacctcacggtaccctgaagcaaacagatttggggacattgattaaaggcatgttcctcatgtggccttctacttgaccctcagctatctgaattggcgaagctttcatgtggctaggataatgctacccacaatcagtgtggcagctcagtgaatgcctgggctttgtctcttcccacccaacgagccccattcaagcccccagggggaagaaaaggagataaaaagacaaagctgtgcacagcccagcgcttctcctctctagctgtgcccaggacagcttttggcttgggctggtccatcctgcagacaagggcagagaaatcaaagaaaccatcacagatctgtggggcaggaaaatgagcctggtccagctttcacagctctctgagatggggcatgttgggaattttagccgatttaataaaagttgcagcatgagacctgtgaatcccaccctgctgcttcctggatcctgccacaccccatccagcagcaaccaagccagtctcgcccctgactgggacagagtggctgagaggggctctggagccagctgcctggatttgaatcccagctgtgccacttaccagctgtgtgactgtaggtgagttatttcacctctctgggcttcagtttcctcatccgtaaatgaggatgatgatattataaaacccttaccccatgaggttattcattcattaaataaataatattataatttatatagttataattcattataatgaatattattcttattcattcattgttcatctacgcagagtgctttgaacttgcctggcatgtacggtaagctattattcattcaacagtataaactggccaggtgaggtgactcaagcctgtaatcccagcagtttgggaggctgaggcatgtggatcacctgagctcaggagttggagaccagcctggccagcatggtgaaactccatctctactaaaaatacaaaaattagccgggcgtagtggcgggcgtctgtaatcccagctactcaggaggctgaggtaggagaattgcttgaacctgggaggcagagattgcagtgagccaagattgcgccactgcactccagcctggatgacacagcgagactctgacacacacacacaaaaaataaagtttaaacttcccaaatcctatgacattgtactattatcatggtaaagaacactgagacagagggactaataacttgcccaagggcacacagctcacaaatagcaaaacggtggtcatgagctgaaagacttatgtgtttctgctctatgtgataatatagggtggtgcaaaagtaatttcagttttttccactacttttgaaggcaaaaactgcaattacttttgcaccagcctaatatgtatgttaggttcccattgctgctgtaacaaattaatacaaacttagtggcttaaaacaacacccgtctattctctaacagttctggggatcagtagtctgacctcactgggctcaagatgtcagcagggctggttccttctggaggcttcaggggagaattcattttcttgccttttttagtttccagaggctacagcattccttggctcatagtcccttcctgacatctgtccaagctcttgtttccatcttcacctcttccactttgaccttcctacctccttctaacaagaactcaagggattacactggggctacctggatcatctggaataatctccccgtctccagatccttaacttaatcacatctctaaagtaccttttaccatgtaaggtaacatattcccaggttccagggtttagggcatgactatcttgagggaccactattcagcctaccacagcatgttcacatttcaataactggactggatttctgggtttttttccagaaaagtcatagcctgagtttttatgaaaaagtaaaaagtatactatggtctcttggctttttgtagggtagatgatagaaagatggaacaatagatcagaaataatgaagatgatgatgatgatagccaacatttgcagagtgttcagcttccaagtagtttacaggcattacttcttttagccgtcaggcaataggatcaggtagggaggcgtgagaactattcccattttacagatgagaaaactgaggcatagagaggtgacatagtcacatggccaaggtctcacgggtggatgtggtagagcctggatgagagcccaggatgcctggctcccacagcccactcagaccctcgggcacttctgcccaggtgtcaggacggtgccagcggtagccttacagggtgtcagagtgctaatgcaaggtggcaggcctccaagatgccattctgaggggtttctctttggtcaattcaggaagctactctttgtccgtgcgagactacgaccctcggcagggagataccgtgaaacattacaagatccggaccctggacaacgggggcttctacatatccccccgaagcaccttcagcactctgcaggagctggtggaccactacaagagtgagtcccaccccaggggtgacatccccaccacgatgggcccacagactcctagtcacggatgcactgtggcccctgagacctgctgtgtccttcttggccatcccctagacagatagttgctttggatgcttctgaaggcttaggactgttgagcaggagggtgaggtggccaagatgtagaggtggcaccccgtcacactctgcttgcttgggaatgtctctgatggtggcaaccaggtggaacactggagagatccagtggaccaggtagggcggcctccaaggagcaacctctggctggctcggtgcttgttgctctcaattgaccagggactctgttccagaggggaacgacgggctctgccagaaactgtcggtgccctgcatgtcttccaagccccagaagccttgggagaaagatgcctgggagatccctcgggaatccctcaagctggagaagaaacttggagctgggcagtttggggaagtctggatgggtaaggacccagggccacagcccacagggccagagggtggaggggagagggaggccacttgcttccaggaacaccttatggcaaagcgggaatgctacccaaggcagagggggagatttaaataatagccataaagaagcagttccctgatagcaaaccaaattgtcttgctgtgcaaacactgatttgcctttgagaccagtcctgtagtggtcaaaaacttccttctgggaagcaggtgtcatggatgaggaatccctccctcatacggagtggggactgcctaacagtttgggattgagataaccagagaccttttcagatgatgaaaattaagaatggggaaatgcagcttggagatttccaggcaactgatgaacaggttattctgagcacctgctgtgtgcccagcactgttagggtcttgtgggaaaatcagaaaggcacatctcacacctgctgattttccccaagaacttaagaacaacactgcctgctttgcagggctgtggggtagatgcagtgccagcccagtgtggggcagcctgctgtgttaatacgttccaaatgggagcgttccaaatgggagcgaagacaacttacagggatgcaaacaactcagccagataaaataagtttaaaatccatgtatttcgactgtatttattgcgattctgctgcatgcaaggccgggcacagtggctcacgcctgtaatcccagcactttgggaggccgaggcaagtggatcaatcaaggtcagcagttcgagaaaaacctggatagtatagtgaaatcccgtctctacgaaaaaatacaacaattagccaggcgtggtggtgggagcctgtaatcccacctactcgggaggctaaggcaggagaatcgtttgaacccaggaggtggaagttgcagggaaccgagatcgcaccactgcactccagcctgggagacagagtgagactctgtctaaaaaataataataaaattaaaaagaatttgacaaaaaagaaaatatggagaggaaggtaagacagatctgagtggtgagatttgaaagccaaaaatatcatataagacgctagactcctactacaggaagcccacggttctggattggagcttcctggaagccaaggcaaaatggaaacccaagcaattataaaattgacaagacccaccaaatgaagcagggtggggtgaggggagggaacagcatgtgccaaatccctgtggtgggaggtgagttgggtgcttgagggactgagtgacctgcagggtgactggcacataaaaggcaaggggagtttagtggctgatgaggctagaggggtggacgaggctgggtcatgtagggcctgggggtcatagtaagtctggcatttatttaagagcagtgttaagattaaagtgggcggtgtatgtgtgtgacataacctgagtagtgttttaaagctatttttatttgtttgggttttttgtttgtttgtttgtttgagacagagtctcgctctgtcacccaggctggagtgcagtggctcaatcttggctcactgcaagctccgtctcctgggttcacaccattctcctgcctcagcctccccagtagctgggactacaggcgcccacaactgcgcctggctaattttttgtatttttagtagagacggggtttcaccgtgttagccaggatggtctcgatctcctgaccttgtgatccgcccacctcggccccccaaagtgctgagattacaggcgtgagccacttagagctatttttaaatccttgcaacagcacttcaaaggcaaagcttaccatttccactttacagatgaggaagctgaggaagccacggctcagagacgttaagccacttgccctagtgtgcacagctgggaagtggtgaacccgcctttcaacccacagttgtctgaggcctaagcccatgatttcgcttccctctctgagagttgagatgagcaggaaagactttctggaggaggcgggtctgcagctgggccttctagggtggtacgggagaccagtgggctctgaccaccttccctgctctctatccccctccagccacctacaacaagcacaccaaggtggcagtgaagacgatgaagccagggagcatgtcggtggaggccttcctggcagaggccaacgtgatgaaaactctgcagcatgacaagctggtcaaacttcatgcggtggtcaccaaggagcccatctacatcatcacggagttcatggccaaaggtgctgcgtgctggggctgggggtgcaggctgtggcctatactggtcaattgcgggcccaagggtggcttggacatggttcttgcccttgagatggccccaatctggccaggagctcttccaacaagtactcattgagaatctaatgtggaacaatccagccctcctggttagtggggtgaaatcatgttaaggggtcaccaaggggaagggagaacaaggggctaccaggagaagggaatggggccagaatactcctgggcaatgggagaaggggcttatggttcacagtgagccttagaggccagggtgtggcatgggtggtgggggtgccactctcccgcatcagccaccttccctgtacttgccaaagccctgggagagggagctggcaaagcagcagttctgcccccacccccgccctgccacaactcaggatttcttggggaatttttttaggccactgtttcacaaccattttcaacccctgccattttttgtttgtttgttttttagggacaggaacttgctctgttactcaggctggagtgcagaggtgcaatcataactcctgggctcaagtgatcctcccaccccagccccccgagtggctgggaccacaggcccatgccaccacactcagctaattttatttatttatttacatatttatttttagagacagggttgccctctgcctacccaggctggagtgcagtggcgtgatcatagttcactgtagcctcaaactctcaggctccaggatcctcccgacttagtctccccagtagctggcactacaggcatgcactaccacacccagctaatttctaaaaaaattttttttttttttgagacagagtctcactctgtttcccaggctggagtgcagtggcacaatctcggctcaatgcaagctccacctaccaggttcacgccattctcctgcctcagcctcccaagtagctgggactacaggtgcctgccaccatgcctggccaatttttttgtatttttagtagagacggtgtttcaccgtgttagccaggatggtctcaatctcctgaccttgtgatccgcccgcctcagcctcccaccatgctggaattacaggcgtgagcaactgcgcccagcttctaaaatttttttctagagacaaggtctcgccatcttgccccagctggtctcaaactcctgggttcaactgatcctcccaaagctttgggattataggcatgaaccactgagcctggcctaacatatatatttgtaaatttcttctatagatggggtcttgcgatgttgcccaggctggtctcaaactcttggcctcaggtgatcctctcacctcggtctcctaaagtgttggaattacaggagtgagcctcgtgcctagccactctgcccattttttgataaacagaatcatctcatgcaatcccatttagtgcgatttgaaacctcaagcctttttcattttaactatgcaattatgccagtcctgtgaaggcatgatcccagccatccaggctcaggggctgtctcagtcacagaatccatctagcaatcaaaaagtcacttcactaaaactcaattctctttctcaaacactaggaattgcaaacaaatattcgtatttaaatctactactatgaaaaatcttcaccacacactaaagtactagattggtgcaaaagtaattgtggtttttgccattaaatagtaaaagtagtaaatgttcctcccctctcccccatataggaagcttgctggactttctgaaaagtgatgagggcagcaagcagccattgccaaaactcattgacttctcagcccaggtgagagcctaacgaggaaacggggaagggaaacaggaattcgatttttttacttgccaaatatttactgaccacatactatgatgatagcagtaataataatgggtaaaatgtattgagagctcagtataaaactatgttttttgcatatattttattatacatgtactcattcatttaatcatcctataagctttataggctgggatttttgttatctattttggtataacaaaccatccaagtcctagtagcttgaaacaacagcaattgttatttctcatgatcctgtgggttgcctgggttcagctgggtggttcttctgctcgtcatggtaaagtgaggtgcagatgttggcacttgcccaggctagaatgtccaagacatggctcagcctccagggtctctccacatagcccctcaccacccaatcacccagcctgagcttcttcacggcgcagcagctgggttccaagacagagctggaccaggggccaagccttcatgagcaggctctcattaagcctctgcctgcatcaggcttgctaatggcccattggccaagtcacatagccatgcccagaatcagtgtgggaggggactgaccaaggacacaaatcccagggaccccctcaatgtaacagtctggccacagagtaggtaattatcatcccattttacagaataggaaattgaagcatagagcagaagtaaagtacagatgtggaaactgagccccagtgtggttaagtggcttgcacaagttactgtgctaattatgggggatatagcagtgaacaaaatgaaaatgttcctgtcctaatagagttcacaatccaggtgggaagatgagtattaaataaccaaatctcttagagaccatgacccaagtggtcctggctgagtcaaaagagcacagtatctaacaaagtaaataatgttcacaaatcgcaaaaacactgctgaaaacctaattttctttctcatgttccccacgccccttgcagctcctctcacccccagcctaagcagttttttcacttctgtcctctctcatgctctctctgatgtctgggaaaacagagtgtaaggacggggtggtattagagtgcatagctagagcatttagcctggtccaggagcaatcagagaatgcttcctggaggaagtggcctctaggccgagcctgaaggatgaatagaagttcagtagatgaagagaaaaggtaaaggtcttttagacaaaagaaacagcctgtgcaaaagtaggtgaaggagttcagcctactcagcaggagcccagggatagtgggagttgagtgagaccctgcctgggcctcagctgggcctgctggagatgccaagggcagggctcatttgagtatgcaaattcaggggcccagaggacaccacaaagtgtaacaaaagactctactttcagagcctggaatgccagaggcatatggaaatgtgttttcactcctatgggccaggtcctctgggagacaatagactggtctgttgctaaattatcatcttcaaactagcagaagccctgctgggcagcagtcaccgaccagggcaagagccactctgcccgtttcacagaggggaaaacaaaccaagggaggaaaagaggttctgggccttcatctgtccagaagcagaggtagattcagagcccagggacagaaaggagcccacctggggctttggtcttcacctccagactcagagaggcagcttggagcagcaggtggagaactggaccacacatgtggggtttctgtagtcacagctttgtgggtgacatgaaatgttattcagtagctgcatatatacaaacaggtcaaaacagagctgctctgactgaagcagggtggggggcttatctgtggcctttcttttgtctcccccacccccatataaccttgaggcatccataggattcagttggaagagctctacaggtccttccagctctgatgctgtgactccctgatactctttggaagcaaacccaagggtgcccaacctcatggcaccctatctgggggtcatgaaatctcaccgcctttatcaacccgcagtgcttacacctgggcccaataaacctactcgttattcattcagtcagcagaccctggagaagcaacactattagcatctgggcttaggagtcacacagagttttgttttgatctcagctctgcctgtgtagcctcaagcaagttgcttaacctctctgagtgccactttcccccactgggagcactgggagccactctttaaataaatacttaactatgtgccaaacactctactaagcccttgatgtaggcttaggggattcatcttcacatgaccccttggaaccaggtgctattacagagaagaaaagtgaggtacagagagatgacacaacttgcttgacatcacagagctgcagcgctcaagctgagttggtccagctccagagccatttagctattaccctctgctgtctcctaagtggggtgtcatccctgccccatcgagctcctgtgaaaatcagtagcatatgagcatctgccagtgagcatcaaacagtggtaactaccagcattagtccttgctccagaagaaaagcaaggcaaaaaagctgggccaagtaacaggtaagtgcgtggaccccaagcagcgcttttggagctccagccctggctccgcaacttgcaagctgtgtaagctggggccacttacctatttctctgggcttcagttttcttatctgtggaaatggggctgataacaaaagtgcctcctccaaagcacatggtaaatgtcacataagtgtttaagtatcatcttataaataagctatgatgccttccattagcatcataacttttgttaactgttcatctaaggactcataaatttcccacactcccagggccaagatgctgtctcactccaccctggcaacctcatccccatttcgtccccaccccccactattctaaacaaaatcagagtctcttccaagtttttactgaaaaatttgggtctctgggtctcccttgggcatgacagctcaggcctgtaatcccagcactttgggaagctgaagcaggaggatcctttaagcccagcctgggccacatagtgggacctcttctctattaaaaaaaaaaaaaattctttttaaatttaatctggcatagtggcatgcacctatagtaccagctgcttgggaagctgaggtgggaagactgcttgagcccaggaggcacaggttgcagtaagctgtgatcccaccactgtactccgtgacagagcaaggccctgtctcaaaagaaaaaaaaaaagaagaaagaaaagaaaaaagcaaagcatgggtctccattctaactgcctcgggtgccccctgctgtccaccccttgcaagtgcgccacccacttgcctcagaccttgagaagccggccggtggtgctttgattgttctgtctagtcagacgccctcacttccagaataatttcatcagactgcacccagctgcagtctgccggagcactggagtgctgggttatttagaggcagcaggatgcactggattgggagtcctcagactggtttgagcctgacattcagaattttcctggtggtgtgatctggaacaagtggttccatgtctgtaaaacagagattatgatcattcctgcctcaaagagctcaagcccagtttgtaaaccaaaagtgctgctttctgggcatctgagggttcatcttcaaccgcttttgtccaaacccttgtaagtaaaaatgtctgcaagatataatccctgtgttttcatcagaggcttctagggctcctggtgtgaataagaatcctccacgcagtctgttagtcactcagcagccatggtgatctttaaatgtacatcagaacatgtcacgctcctgctcgaaggcctctaatatctccccaacacgctcagaataaaatccaccctcctctcctgacctacaaggcagttcatgattggcggcctccctctcaacttcaactctccccactctctctgtggcatcttctgctggccacactgacctctgtgctgttccatgaacacccaagctcttacctacctccacgcctttgcatctcatgttctctctgcctagaatattcttatgcgacacacttattattatcatcattcagatctttgctaaaatctcaccccctcaaagcaggtttccctgaacgcccaatccaaaaaagctctctacaggtcatattttgttactttgttttatcttttttttctttttgagacagagtcttgctctgtcgcccaggctggaggacagtggcacgatctcggctcactgcagcctctgcctcctgggtccaagcaattctcgtgcctcaacctcctgagcagatgggattacaggcgtgcaccaccatgctcatcttctttttgtatttttagtagagacggggtttcgccatgttggccaggctggtctcgaactcctggcctcaagtgatccgcccacctcggcctcccaaagtgctgggattacaagtgtaagccaccatgcccggcctgttttatcttttctttatggtacttaccacctgcaggggctttgccgggctcatcacctgttcaagcaacatgtctggcacccacaagacactcagtggatttctgttgagtaaataagtgaattttccctacccaggctggggcatgaggaagatatgagaggtatagcagaatatgacatgaacctgggttgtccccagaaagagagttgaaggtgaaagctcttcatagtatcctagggttcgtgtgtgtgtgtgtgtgtgtgtgtgtgtgtgtgcatgtgcacgtgtgtgtgtatgtgtgttcctggaagaataggtcctggagaaatagtcccattgctttttccctgagaacatttcaaagtgctctctggaagtcttggaattctagagaatcccccaaactggcccaggcctccttagggatccccctaacctgaatgggttgatggaggaatgccaccctgagccctggggccctcccgacacaaaagggagggctggtgcagacatttcgcattttcttcacttgaacacctctctgctgcttttgggtggggccatcttggcgtaggccaggtctgaggacaaaggtgtctctgtttggggtgcagattgcagaaggcatggccttcatcgagcagaggaactacatccaccgagacctccgagctgccaacatcttggtctctgcatccctggtgtgtaagattgctgactttggcctggcccgggtcattgaggacaacgagtacacggctcgggaaggtagggaacgctgccaagcagccccacgttgcccatttggatgcttgtgagtgttgagagttgatacttgtgagagcgattggtaaaatgcaagggactgccccagtactagctgtgcattcttgagcttggtggatccttctggataatgtcctgaacttcagagtctcactcagagattttgaggagattttagatcagattgagaagtactgatagattttagagggagtgggcaaatatatgtcgaaattaagggtaagagcagctttgtgcataacagacaaaaatggggagggtatccaaatgtccatagcaggaggatggattgtggtatattcacacaatataataccacgcagtgatgaaaaagcacaaactggccaggctcagtggctcacgcctgtaatcccagcactttaggaggccaagactggaggactgcttgagcccagaagctcaagaccagcctgggcaacacaggaagacctagtctctacaaaaatttaagaaattagccaggcatggtggcacatgcctgtatgcctgtagttgtggctactcaggaggttagggtgagaggatcacttgagtctaggaagctgaagctgcagtaagccatgatcatgccactgcacccagcctggtggacagagcaagatcttgtcaaaagaaaagaaaagaaaagaaaagaaagaaagaaagaaagaaagaaagaaagaaagaaagaaagaaagaaagaaagaaggaaagaaagaaagagagagaaagagaaagaaagaaagaaagaaagaaagaaagaaagaaagaaagaaagaaagaaagaaagaaagaaaagaaagaaagaggcacaagccaatgctaaatgcaccaaaatgggtaactctcacaggtataatatcaaaatgaaagaaattagaccaaaaaaaaagagtagatgccacttggtttcgtttttgtgaaattctaaaagagacaaaacatgtaattggacattcatggcagcattcttcctaatagccaaaaaatggaaacaacactctttaatgtccatcaattgatgaacagacgaacaaaatgtgatatatccatacaatggaatattatttggccataaaatggaatgaagtactacgccaggctagaacacagatgacccttaaaaacattttgttaaaggaaagccaacatgaagaccacatgttgtataattccccttctatgaaatgtccagaagaggcaatcttttttttttctttgagatggagtcttgctgtcacccaggctagagtgcagtggctcaatctcagctcactgcaacctctgcctcccaggttcaagcgattcttgtgcctcagccttctgagtagctgggattacaggcgcacaccaccatacccagctaatttttgtatttttagtagataacagggtttcaccatgttggccaggctgaactcaaactcctgacctcaagtgatccgcccgccttggcctcccaaactgctgggattacaggtgtgagccaccatgcccggcccagaacagacaaatctaaagagacagaaagtagattattggtgcctacagctggtggtggggagttgggagaaatgaggagtgacttctgtgggttttttgcagggaaatgtgatgaaagtattctaaaatccacaactttgtaaatattctgaaagccacggaattatacactttaaatgggtgaaatgtatggtctgtgaattctatctcgataaagctgttaaagaaagaaacaggcaaaatttatttatagcactagaggtcagaattgcagtcacctttagtttctgttagcctaatatttatttatttatttatttatttatttatttatttatttatttattttgagacggagtctcgctctgctgcccaggctggagtgcattggcgccatctcagctcactgcaaactccacctcctgggtttaagtgattgtcctgcctcagcctcccaagcagctgggattacaagcatgtgccatcatgcccagctagtttttgtatttttagtagagacagggtttcaccatgttggccaggctggtctcgaactgatgacctcaagtgattcacccacctgggcctcccgaagtgctgggattacagatgcgagccactgtgccagtcctatttatttttttaaagagacgggtgcggccgggcacagtggctcacacctgtaataccagcactttgggaggccaaggcaggcggatcacaaggtcaggagtttgagaccagcctggccaatatggtgaaaccctgtctctactaaagatacaaaaattagctgggcgtggtggcaggtgcctgtagtcccagctactcgggaggctgaggcaggagaatcatttgaacccgggaggcagaggttgcagcaatgagccgagattgtgccattgcactccagcctgggtgatagagcgagactccgtctcaaaaaaaaaaaaaaaaaaaaaagataggtgcttgctctgttgcccaggctgtagtggaggggtgagatcatagctcactgtagcctccaactcttgggctcaagcaatcttccagcctcagcctcctgagtacctgaaactacagatacgtgctaccatgcccagctaattttttaattatttgtagagatagtgtctcactgtgttgcccaggctggtctcaaactcctggacttacgtgatcctcctgcctcaggctctgaaagtgctaggattacaggcatgagccactatgcacaggctgcagtcaccttaagtaagggggtattaactggaaggacgcagaaaggagcgttctgaaatgctgaaaatgttctacagcccaatctgatggtgattacaagggtatatatatatatataaagctgcagcaaaatggatattaaagatttgtgcatattatttcatgtacgttataactcgattaaaaaaaatttagaccgggcacagtggctcatgactataatcctagcactttgggaggccaaaatgggcagattgcttgagcccaggagttcaagaccagcctgggcaatatagcaagaccccatctctacaaaaaatttaaaaataagtcaggcgtggtggtgtgagcctgtggtccctgctactcaggaggctgaggcgggagaatcgcttgagcccaggaggttgaggctgcagtgagccaagatcatgtcactgcactccagcctgtgtaacagagcaagactttgtctcaaaaaagtaaataaatagggccgggcacgttggctcatgcctgtaattccagcactttgggaggctgaggtgggaggatcacgaggtcaggagatcgagaccatcctggctaacacggtgaaaccccatctctactaaaaatacaaaaaattagccaggcgtggtggcgggcacctgtagtcccagctacttgggagactgaggcaggagaatggcgtgaaagccgggaggcggaacttgcagtgagctgagatgacaccactgcactccagcctgggcaaacagagcgagaccctgtctcaaaacataaataaataaataaataaataaatgtaatgactaaaggaataaaagtagaatgtataatttctaaaccagaagaagataagcaggaaatcaagaaaagtctgtagatccaaaggaggaagggagaaaacatatacacacacacacactctcacacacacaaacacacacatagaacattttcaaaacttgaccatgtactcagtcataaagcaggtctcaacaaattccaaagaacatatattctatagaccatgttcaccaaccatgatataattaaactaaacactttttaaaaaaggataactatgccaggtgcggtggctcacacctataatcccagtgctttaggaggccaagatgggaggatcacttgagcccaggagttttgagaacaggctgggtaacataataaaacactgtctctacaaatttttctatttttttatattttattttattttattttattttatttttgagacggagtctgactctatcatccaggctggagtgcagtggtgtgatctcggttcactgcaacctccatcccctgggttcaagtgattctcctgtctcagcctgtagctggaactacaggcacctgccaccatgcccagctaattttgtatttttagtagagatggagttggccaggctggtctcgaattcctgacctcaggtgatcctcctccttggtctcccaaagtgctgggattacaggcacaagccaccatacctggccaaaaaaatttttttaattagcttggcataatggggcacacctgtaaccccaggggcttgagaggctgaggcaggaggatagcttgaggtcaggagttcgaggcttcagtgaactatgattgtgccactgcgctccagcctgggcactctgtctctaaaagaaaaaaaaaatgaaaaggctaactaaacccatgtcagactaggtgggaggaagggcgggtaaagggagagacacatagtgactggtgggaacctcatgggctgagagccagaatcctcccttttcccatcgcccaggatgagaggactgaggcatcagctgcaacctggactcaaggccccctgaagtccttctgtccccaaagacctgtgacctctgggattccactcttcggagttgcagttaactggggtatcagctgaatcaacgaggaggattctagagtgaacttccacaccataccccaggcccctaagcccactcctccttgtttagccatctgtcctcaggatggatgtcccttgcttccacagggaggccacgtatcagggaaattgcaggtctgcaggggcagatgttggcagctcttgcccttgcctgttcccccaccttagcagagccaaccctcactactccccagccttccccgactctgctctgttcaaccctgcaggggccaagttccccatcaagtggacagctcctgaagccatcaactttggctccttcaccatcaagtcagacgtctggtcctttggtatcctgctgatggagatcgtcacctacggccggatcccttacccaggtagggaaggggcatcagctcagggctgctaccagggcccagtctggcaatgggctcatctcaacaacatgtccattcaaactgagttcttgatcctcacccccaaccttccctcacctttcctgtcttagttaaaggcacctccatccatctaatgtcttaagcctgaaatctgggggcttccttggcccttccttctctctcactcctatgactttttttttttttttttttttttttgagacggagtctccctctgtcacccaggctggagtgcagtgacgtgatctcggctcactgcaacctccgcctcccaggttcaagcgattctcctgcctcagcctcctgagtaactgggattacaagcatccaccaccatgcctggctaatttttgtatttttagtagagacggggtttcaccatgttggccaggctggtctcgaactgctgaccttaggtgatgcgcctgcctcggcctcccaaagtgctgggattacaggcgtgagccactgtgcctggcctcacccctatgacatctgagcagtcacagggttttggccactcgactccaaaacatatcccaagtctcaccactttgaaccccacagtctccactgcatccaggccagcgtcatctcccatagatggtgcagcggcatcctcatcagtcttactgctttctccctcctcgtcctacagcctattctccacttgcagccagaaggataattctaaactttaaatcagatcttgtcctttctccacctttttttttttttttaagacaaggtctcactctgtcactgaggctgtagtgcagtggtgtaatcatagctcatggcagcctcgacttcctaggctcaaatgatcctcccgcttcagcctcccgagtatctgggaccataggcacatgccaccatgtctggctattttttatttttttaatttttttgtagagacttggtctcactacgttgtgcagcctggtctctaacttccaggctcaaacgatcctccagccttggcctcccaaaatgctgggattacagacacacaccaccatgcccagctaattctttaaattttttgagagacaaggtattgctatgttgccgggctggtgatttccatttttaagcgatgctttcagcatggagagtgaatgggagggaaagggaacagggtggcagccagtgaggaggccacagcagtggcccaggcagaggtgatgatggtctggacagggtggtggcattcgtgactggcatacgttgatgaactggtgctacgtttcaaaaggagaaaagatctgacttgctgacttaggaggtgagagagagagaataaaggatgattaccctggctttgcaccacagggtgggtaatggtctagggatagaaattggagagctctgttttagctctgctaaatttgagttgacttaaatatagagacatccaagtaaaggaagcacttgagttcatgagtttggagtttgagactaataatataaaattggggatcacagacattgaatggctattcttatgaatagctaatagaaacttgaactgaacaaaaaaatggtcccacccataggttaacattgaatctggccacctgaatgttttgtcttgagggtgcactagtcaaaaccaggcaacacacaatagacgctgaatccattaggatgtgttccacagcaagcaacaaaataacagacaaagagtaactgaaatagaagcaatctattactcccaatcttccattggtgactggttagttcagcaactcagcagctgtcaggactctgggttcctgtctctatgatggtcttctccatgttgtcagctccaagtatcataagtatctcacagtgttcaaaggaagagatgaagggtgcgttctccaaagactctcctctaagcgggaggaaaaacctttccatcactttcccagcagacctccccatcagctcccattggcccaaactgggtcccaggcccatgtcctagctgcaagtgaagctgagggtggaagtctgtctttcacagtggaaggggctcagcttgcaaggtgaggtggggagtgatgcctgctggggaggccacagggcctgccacccctgggctctcatttcccaactgcttccgtttctaattccacggctccttttcagggatgtcaaaccctgaagtgatccgagctctggagcgtggataccggatgcctcgcccagagaactgcccagaggagctctacaacatcatgatgcgctgctggaaaaaccgtccggaggagcggccgaccttcgaatacatccagagtgtgctggatgacttctacacggccacagagagccagtaccaacagcagccatgatagggaggaccagggcagggccagggggtgcccaggtggtggctgcaaggtggctccagcaccatccgccagggcccacacccccttcctactcccagacacccaccctcgcttcagccacagtttcctcatctgtccagtgggtaggttggactggaaaatctctttttgactcttgcaatccacaatctgacattctcaggaagcccccaagttgatatttctatttcctggaatggttggattttagttacagctgtgatttggaagggaaactttcaaaatagtgaaatgaatatttaaataaaagatataaatgccaaagtctttaccaaaacgttggttttcctgtccttccaattcctgaatatctatttgccttcttgctgtatgacaagtcagaaatggtgaaggactctcccggggaccagaaatacaaagacaagtggggttcagactgggtgctgtggctcccacctataataccagtgctttgggagaccgaggagcgggggattgcttgagcccaggaggtcgaggccacagtgagctatgatcgtgccactgcactctagcctgagcgacacagtgagaccctgtttaaaaaaaaaaaaaaaagatgaagaagaagaaagaaaggaaaggaaagaaaattggggttcaatgcttgaggttttctaactgccctaaaatagttactggctatattagtttcctcttgctcctgtaacaaattaccacatatctggtagcttaagacaacaaaactgcataacattacttggccgggcataatggctcatgcctatagttccagcattttgggagactgaggtgggtgatcacttgagatcaggagttcgagaccagcctggccaacatggtgaaaccccgtctctactaaaaatacaaaaattagccaggcatggtggtgggcgcctgtaatcctagctactggagaggatgaggcaggagaattgcttgaacccgggaggtggaggttgcagtgagccgagattgtaccactgcactccagcctgggcaagacagcgagaccctgtctcaatacatacatacatacatacatacatgtataaccttactgttccagaaaagcaagaccctgtctcaatcaatcaatcaatcaatcagtcaatacatgtataaccttactgttccagaagtcagagggactgaaatgggttggcagggctgcattctttttggaggctctaggggataatttgtttccttgcctttcccagtttctagaggctgctcctattccttcactcatcagcccctttcgttcattactccaaactttgctttcatcttcatatctcctctgagtcttcttcccctcttttatttgtaagaactccttggacccacctggataattcagaataatcttctcatctcaggattcttaatcacctttgcaaagtcccttttgccatgtgaggtaacattttcacacgctctgagggttaggacatgaacatctttcgacggggggcacttttctgccttctccactggtatccagatgctggatgggttttgcctccaaggagatgggtcttccaggatgacaggaatggtttctcatgatctgggaccctgactttcctgttaggccacattgctataagagctggtcagtttacagctccccagagctgggggctgcctgcagacctgacgtttcccatgggtcaagcagccatcatacttgtcgaagtggtatttgccattgcaggaatcctggtctggagatatggctgctgagaggtgtctagtaccctacaggggaagctctcagtggaggggtgggagacctgcgtaggaagcagagaagacgaagcagtgcgggcttcctgaatgttgcctcagctgaaagaccctggcagctagtttttatcatagagagaaagacaaaagaggtggacaatgggtgaaaacgaaacaccacctttctatattattgcatcccctgaaggttgtacatcacatcaccccccagggtcccatggaatcctatactaacttgattctgtacttctgagtagggtggggttctaaccttaggaactgaatataagaacagtggaaaataaagctagcagtgtttcaatttacctagttggtaatttctttcttgctttctagtttggggtatggcttgggtacatgaaagcagagcccagggtcttctgatggaaatgttcccttatgatttgtgataataatccaatgggaggagtacatttccctgctccatcagtgttgagcttgaccgtgagacttgctttagccaatgggatgttagcagatgtgatgcaagcagaggcttgaaacgtgcttgtggggctgggcttgccttccagtcttttgccctgaaaagaacatggtccgaggaagatgagtgacagatggagcagacctagaccaacctgcaggcctgagcccagcctagatcaactgagctccatctgacctgtggacatgtgagagagaaatagatgcttttgtgttctggggttgttttgttacataaaagtatgacagccacagcaactgaggcacgatctcaggagttggagcctattgcttatgaacaaggttaagagatcaatttctgcttcttactctttcaatttataccgcccaaaccaacactgatttgtctctctggtcaccgaaaagacaggtaaaaacatggggatagatacaacaccaaaagcatgatccacaaaagaaaaaaaagataaactgtacctctttaaaattaaaaactctgctctgccaaagacactattaagaaaatagaaacatggccaagcgtggtggctcacgcctgcaatcccagaactttgggaggtcgaggtgggtgaatcaccagaggtcaggaattcgagaccagcctggccaacatggtaaaaccctgtctcaactaaaaatacaaaaattagccaggcatggtggcgggcgcctgtaatcccagctactcgggaggctgaggcaggagaattgcttgaacccaggaggcggaggttgcaatgagccaagatcacaccattgcactccagtctgggtgacaagagcaaacctctgtcttaaaaaaaaaaaaaaagaaaaagaaaaaagaaaagaaaagaaaagaaaaatgtgattcccaagcttgtagaaaatatttgcaaaagatatctctgatgaaggactggtatctgcaatatataaagaactcttaaaacccaacaattaaaaaaaaccgtatctgctaaaatagctgagattcaaaacactgatgacaccagatgctgaggaggatgtggagcaacaggaactctcattcattgctggtgggaatgcacaacggtacagccactttggaaggcatctggcagtttattaccaaactaagcataacctactacacaatccagcaattgtgctcccatatgagttgaaaacttacgtctacacacactcacaaaaatggcacatggatatttacagcagctttattcataaatgccaaaacttggaaacaattaagatgtccttcaataggtgaatggataaacaacttgtggtatattcacataatgggatattattcagcactaagaaaaaagagttgaccaggtgcaggtgcagtggctcacacctataatcccagcactttgggaggctaaggtgggaggattgtttgagcccagaagtttgagaccagcttgggcaacaagtgggacccccccccccaccatatctacaaagagttaaacatttagctggttgtggtggcatgcaactgtggtcccagctacacaggaggctgaggcaggagaaacacttgagcccaggagattgaggttgcagtgagccgtgattgtaccactgcactccagcctgggcaagagagtgagaccctgtctcaaaaaataaataaataaataatattggccaggcacggtggttcacgtctgcaatcccaacactctgggaggccaaggcaggtggatcacttgagcccaagagtttgagaccagcctgggcaagatggtgaaaccccatctctacaaaaaatacaaatattggccgggcatggtggcaggtgcctgcagtcctagctactcaggaggctgaggtaggagacctacccaggaggtctaggctgcagtgagccgtgattgtgccactgcactccagcctgggtgatagaatgagaccctgtctcaaaataaataaatagcggggcacagtggctcacgcttataatcccagcacttttggaggctgagatgggtggctcacttgaggccaggaatttgataacagcctggccatcatggcgaaaccctttctctactaaaaatacaaaaagattagccgggcttggtggcaaacacctgtagccccagctactggggaggctgaggcaaaagaatcacttgaacctgggaggcagaggttgcagtgagctgagattgcaccactgcgctccagcctgggcgacagagtgaaactctgtctcaaaaagaaaattcaaaaataaataaataggccgggagtggtggctcacgcccgtaatcccagcacttcgggaagccgaagcgggtggatcacctgaggtcaacagttgcagaccagcctggccaacatggtgaaaccccgtctctactaaaaacacaaaaattagcctggcttggtggcgggcacctgtaatcccagctactcgggagactgagacaggagaatcgcttgaacctggaaggcggaggttgctgtgagccaagatcatgccactgcactccagcctggacaacaaaaagcaaaactccatctcaaataaataataaatagataaataaaccttttaaaaagttatatataatattatatatattttatatttataaatatatagttatatacttatattaaacatagattatagtttacagctgctgtgtttctatatcttagctattatgaatagtgctgcaataaatacgggggtgcagacattgatttcatttccttttggatatatactcagaagtgggattgctgcattatatggtagttccatttttaattttaattttgatgaacattcatactgttttccatagtgaccgtaccaatttatgcaagagttcccttttctccacatccttgccaatacttattatgtgtcgttttgataataatggttctaagaggtgtgaaatgattgctcattgtggtttcgatttacatttccctgatgattaaggatgttgagcacctttccatttacctgctggccatttgtctgtttcctgagaaatgtctgcttagatctcttgcccatttttaaaccaggttatttgggattttttgctattgagttatttaagctccttatatattttggatattaaccccttatcagatcgtttttgatttgtaaatattttcctcagctctggaggtcacctttttactctgttgtttcttttgctgtgcagagctttttagtttgatgcaatcccacctgtctatttttgctttcgtttcctgtgcttttggtgtcatatccaaaaaatcattgcccaagccaatgtcaagttttccctatgtcttcatctagtagctttacagtttctggccctataagtctttaatccattttgaattgattttgtatatagtgtgagataaaggtccaatttcattcttttgcatgtggatattcatttttagggatgacgaaaatgttctggagacggatgacggtaatgattgacaactttgtgaatgtagttgatttcactgatttgtgcacttaaaaatgattaaaatagtcaatatttagttatgcatattttacaacaatgaaaaatatttaggccgggtccagtggctcacacctgtaatcccagccctttgggaggccaaggcaggcagatcactcgaggtcaggagttctagaccaacctggccaacatggcgaaaccccatctctactaaaaatacaaaaactcagccgggcttggtggcatgcacctgtaatcccagctactcaggaggctgaggcaagataattgttcgaatccgggagtcagaggttacagtgaactgagattgcgccactgcactccagcctcggcaacagagtgagactccatctcaaaaaaaatttttttcagaaaaaaaagagaaacttgcccatgttatggagctaatgagtggtggaaatgcgttctgaacccaggcagtctagttctaggattctggcatatgtcaccaaaagagattgggatatgaaaggcctttagggaaaaatacaaagcatgagaaaaaaaatggaaatactaaaaaataataggccatttatggagctttgctccttatcagttatctttcttcaggcagctagaaatggtgggaaacactcaggatcgaagctctaggaaaactggttccaagtctggaaactatgagactgcagcaaattccccctagtctctcaagcttcctcctccttggggttaatagccaatctgccaatcttcaggatggttgtgcaggtcacaagagttaatgggtgtgtgtttcaatgatctattactgaaatgatctataataaaccaccccactctaaagctgggcttagctgggcagttcttttggtccacatggtgttcatgaggttattcatgtagctgcattcagctagtagctcagtgggggttggaatgtccaagatgacttcagttacatattatagtgcttagctgtagtttctagaatgtcttgaggagttggctgggcctccctctctctccaggtgcctttccagcagagtagctacacttctttataaccaagaaggtagaatcagacgttttcaatcctcttaaggcctaggctcagtactggcagaatcacttgtagcacatcctattggtcaaagcaaccaacatgaccagccagattcaacaggaggtaaaacagagtctatctcttgaggagagaaaccgtatgctcatcatgcaaggacggacagaactacgtggcagccatctttgcagaaaatccaccacagtggtgcccataggtggggatcagagttcaactgtcccttgccccctagaattagataaaaagagtctaatgaactgttagcataatgctaagtgctgcagcacacaaaatgctcggcaagtgctgatgattattattaatcattattattcttttaatagcttttttaaaacagtctaagatagcactggtactgtattcagtttaaagtgatatacatgggtcaaatgaactttgagttctttcccaaccttaataccatgattctttgagtctctttttcacagatttggaaactgaggcttaggaagattgcgtgacttgtctggagtcacacactaagctagtgcatgacgtccacattcagagatatctccctccactgaatatgctggttttcactcgttcatttaaaaaataatgtattgggcatctaccacaagcccaaaggagtatacataaacatatactgacaattatttattgaatacatcctatgtaatactgtgtcactgaatcctcatcacaagcctatgatgaaccaacccccttcccatttcacagatgggaatgaggaagagcaaggtaaaaaacgaacaaacaaaaaaacagggtccaccctcatggggattacagtctactaaagaggatataggatagtcaaacaaatacttaaaatcaaacaaatacttaaatatataattacaaattattcttggagtcgtactgctcttggagccccagtgcccaccctttccctcaaatcaaggtctcaggtaaccctggcaatgggtcttcctgccagtagtaaagatggcgctgagagcacgagcgcactttcgcacacccccattacccacaatgcagcgggaataagggaggctcagtttctgccaggagctaatatggcttccttagttacaccgttctctctcttcacctaatcagcgaccttactttcccagaccagactgtcgagcaggagctaagactccttttcccctctgctgaccgccactacaggagcggttgaagccagacgaccaccttgtggagttaaactccgtaaccagggagcaccacttccgctgacgtcattacggcgacacgtggatccaagatggcgacggcgatggtgagtgaaggagactccgggagcgggagctggagcggggccctccggggtatcccaggatcttccagcaccccatgcctggccctgagccacctccgggacccctgactcaggcctgagggctacctctgactgggcttgtcttccccgaaatccacctccctggccctgcccctgcactcaggcttgtgaaggccccgagttttgggggaggcgccgtttcggaggaagacctcggctgctgccttcgccggttcccattctacttttggtctccgcccactgtgagccccattttccatttctcacctccctgtcctgacccctctgaagaccccctcccgttattctcatccttgctcctccccgtcacgtccagaccctgctctccccgcctccccaccatcataaccagtccgcagatgtgacctctcctctgaccaccctcccagcccaagcgctgcctcagatccttttcagagccctgtcctcacttacactcatagctgtccccatcgcgcacccccttgactgccgctaccccagagcttgccttcacctaccccacccccatctttcatccctagaggcttccctgcccttcctgtcttctctcagtcaactccctgcccctctcttagggaccttttaccctgttggttctcaaactttactgtgcataagaatctcgaggtgtgtagggggaggcatgctaaaaatgcagtttcctgagcagccccactcccagagattctaattccatagggctaggtgatgcccaggaatctgcccttttataagcactctagtgattatatagtggaggtggtctgtgaactacgttttgaaaaacactaatagccccacctcactgctctccttcccattccccaacatggccacacagctcgttagggatgaaggctctttattatgaagctatatgttgggatgaagtctgtgtgtggatgagggtggaggtaaaatagccatgcttggaagttgggtcagagcttgcgggctcctggtgcagaaccttggaagtaaatctttgaaggactggccctttttctaaaagtttagttcaaattctgcttgtcaagagaccagaactaaaattgaagtcacttagtccagaatgatttcctgggtcttcctgcatactgcctcctcagcagataatttcgtccggggagtgaatgacaaggaagactcagagaaaaggaaatgacatttgactttagcaaaggaagattctggcttaaataatttggtgttggttttctccaaacagggatatattattgactggtagcaattttccctccttctcttagctgactgagaacttacctttgtttaatgagggattccttatttagaacttcagaggtcaggtaaaaagatttcatggccttacctggtttctgtggtttcagacttcaggctgaaccacgagtggggcaaatcctcaaagtagtatgttgaaacctacatatatgtatatatattctggtaccacattcagaacagagatagtgtaagaacttaaaaggaaatcacaccctctcttgctataaggaaaacattgagtaaagtggtatttacggcactgcactgggaaatccctgccttgttcagagatttttaagaggttataagctagcaatacatatatgtggtacacatctatttagtcaacaaatatttgagtaccaattctgttccaggaactagggatgtagttgtgaattacagggtcaaggtccctacacttgtggagcctttctggtttgaggagacaggcagtgaacaagtaaatacgtgaacaaaataatgtcaccagtagatgctgtgaggacagcaaaatgaagtgatagtgattaggggtgactgggtgacacaactactttggattgagtggtcagaaagaagtcttctcagaggaggtgacttgagttaaaacataattaacaagaaggaaccagccatgcaaagaatgttccaagcaaaggaaatggcaagtgtaaggggccgatgtggaagggagcttggtgtttttgaggaacacacagaaggctggaggggccgaagcatgatgagggttggggtaggagagaatgatacaagatgaaactggagggaagcaagagcaactgttttgagaagcatgcctggaaatgggaaggactgcggtctacattttgttgtctgtggattgcattttgaaatagtgttgtattaggctgcttccccttcccatccccttcaggacagtacttgaagggagccagcttgttctcagttggcacagaggctgtggaaaggagtttggattttagtctaagcacagtggaagggacagtgatttttgcccagcacagtgactcacacctgtaatcccagcactctgggagaccaaagctgggagatcgcttgagctcaggagtttgagaccagcttggacaacatggcaaacccctctacaaaaaaaatacaaaaagaaaaaattagctgggcttggtggtgtgcacctgtagtaccagctacttgcggggctgaggtgggaggatcacttgaacctcagtgagccctgatcactgcactgcactccagctttggcaacagagcgagaccctgtcttaagaaacaacaacaggccgggagcagtggctcatgcctgtaatctcagaattttgggaggctgaagcaggcaaatcacttgaggccaggagttcaacaccagcctggccaacatggcgaaaccctgtcttctaaaaatacaaaaattagcagggtgtggtggcacacacctgtaatcccagctactcgggaggctgaggcacaagaatcgcttgaacccgggaggcggaggctacagtgagccaagatcgtgtcactgcactgcagcctgggtgacagagtgagaccctatctcaaaaaaaaaaaaaaaacaaaaaacaaaacacaccaccaccaacaaaaccctgcaagtacggtgatttagtgtttgttgtgccacctgggagtgttgtactgaaaacagtaactgatttaaagaaactgagtatgtaacatatgcagtgacccacagaggccagtttaaagggtgcatatggagaaacttcatatctggtgcaatagtgaaaaggtgtggaagcaaatttattacaggggtatgtgatgaaggggcaaagtggagtcacaggcttgagtttggtctgtgtcagcacttcattacacggaagtcagaatagtccccacaccctcatacacaccctcatttcataaccattggggcgagggggtgcggtagacctactttggagtgtatgggtctctgaggtgagtcatacagccaaagaggaactgaactagtggatccagtggccgtgggaatagctgggttgctggtttgtcctttgttttgaaagttagggttgtgggtgcaagtgcggtggcatgtgagcttttccctttctctctttccttggtgaatggctcttcttccccaagggttgagccgccagctcccagaacaatgtcagtatggagggtgtttcctgaacccgcagggcaagacttctccctccatagaagatagctggtgtaaactgaagttctctttgattttcctgtcttcttccatccttagatttagactactctgtaaagttacaggatacagtgttgatctagctaggtctgaattgagatgcgggctcatgtctcactctttatggaaaacggttcttgggaatattatttcattgaaacttgggaaatgtccattgagtacatttctagatgtgtcaggagtctagaaacttcagtttggagaataaaactctacttccctcacatcattgttcatactgttttggtttttattataatcttctttatggatataattcatatgccataaaattcacccctttaaagtatataatttagtgggttttagtgtttttataggttgtgcatacactaaatgtgatggttatcaccattgtgtaattcggaacatttcatcaccccaaaaagagagtcactccctactcttccctccccacagccctaggcaactactaatttaccttctgtccctatagatttgcctattctggacattttatacaaagataattatataatatgtgatcttttgtgtctggcttcttagcataatgttttcaaagtttgtttatgttgtatcatgtatcagtagtgccgcatccctttttatggctgaatcttcccttgtatggatgtaccacagcttgtttatcactcatcagttgatggatattgggattgttttcactttttggttgttaggtataatgctgctgtgaacattcaggtgtaagttcttgtgtgaacatacattcagtttccatgggtgtatggaagtgtattcctgcatcagttcacactgttttgaggttacttgggtttgagccactccagaaacaggaatggaataaatgacatcaagattcctttgtgctaatggagccaatgccagtagtccctccagccccagtcaaaggcacagaaactggttttgtttgtttgttattattatttgagacagggtctcactctgtcatccaggctggagtgcagtggcacgatcatagttcactgcagcctccacctcccgggctcaggcgatcatcttgccttagccttctgagtagctgggactacaggcacgcaccacatccacctaattttttaattatatttttcttagagacagggtcttgctatgttgcccaggctagccttgaactcctggcctcaagcaatcctcccgtcttgacctcccaaagtgctgggattacaggtgtgagtcactgtgcccagcaaaaactgtttttaatggtgaaatagcgtgctaatcaggttggatgatagagtcctggaacagaaggccagaggcctgaactgtgccatcagtcttgtgtgcaggaagttgctgtctcctctggaccccatgtacaggaggacatgagctgactgaagaaggaacgctggagcaggagccagcagcctgggcttggtcccagcgctgccactgatgcattgtgtggcctggggcaaattactttggcttcattagtctgttttccacatatgtcatgtgtgaaattaaggtttgtacttgatgatttccaaattctgagttgaaaattttgtagtttggaatactttaaggtgagttttgctaatatgcctataaaatcagacttattttgttttttccatgatgatggtcactgtgatctttccaagctgttgtgttggttgtattgtctgtctgatcacccaggtttccccacctggctcatgttctgcaggagctactgtgtccttggagctgaggtgctgacatcgggccttggttaaatgtgtttctctgaggggtccctttaaaggaatgcccttaatccccctcaggaagtacagaggaggttgggatcacattaagttgcctcttagtttctgttttacaacttggacaaacgtctccctttgatcttggcattaaagaagcacgtcagagaatgttggagaaggctgagttttgatctctgggcactggcaaaaaggtgggaaggacccaggatgagaagagccatctggccacggatgaataataggagccactaccaccttcaagcctgctttgatccctgaaccatttgctgacactagagtttcccaaatggggcatggatggggacacccaggacttctcagttccatctcattccttttcattgcttccttctctcccttcctaacatggtttctcacctatgcctgatgctttaaaccaacagacctcccagggtttgaaatcctcttatgcttggtctgagaatctgggctagactcccagctctgacactgtgattacttttgtgactttggactgattggttatgtgattttgggaaaaccgtttgcgcttttaagcctcaattaccttatattaaaattttttattgtggtaataacaaaacctaccactttaagcttttttttttttttttttttttttgagacagagtctcactctgtcgcccagggtggagtgcaatggtgcgatctcagctcagtgcattactgcaacctctgtctcctgggttcgagcgattctcctgcctcatcttcccaagtagctgggactacaggcatgtgccaccacgcctggctaatttttgtatttttagtaaggatagggtttcgccatgttggccaggctggtctcgaactcctgaccttgggtgatccacctgcctcagcctcccaaagtgctggtattacaggcatgagccaccatgcctggcccactttaagcatttttaagtgtgcagttcagtggcattaagtacgtttacacatatgcagctgttagcactatccgtctccagaactttttcatcatctcatttttgaaacaaggatgatattctcaagggattgttgtgatgattaaatgaaatatgagatgaaagtgctagcacagagagggcactctgtaactttactccaaggtttgaagtcttcccgtggtgagctatctaagcctgctgcttgggctagctgagagttcttttataaatacccaaggtggagacaggagagcagtacgtttctgcacttggtggtgtcagggttgaagtctggttgcctgttgcttcgtgagggtggttattagtttcacctggacttccgcagtgcagcctgctgtgcgtttttccctacccccaaattacagctttgagtctttcatgtgtctctgttcaacagctactctgtgtctgtgggctctgaaataaaggctacattttcagtttcctgtggctaatttgttttttgtttgtttgtttgtttgtttcttgctctgtgagttctttagttccatgggcctgcttggtaagttgtctctagctgtcattagccttcattcacatgcggctggattcttggtaagctttaactgactggataattgacttcagttaactgttggcaaactgtgcccaaagcctttttcttttttttttttttcctcctttttcctttttcttttttttttttttttttttttttttgcttaatctgagggagcagttactgacatggtctcaaaatggtgactgtcgccaggcacagtggcttacacctgtaatcccagcactttgggaaatgccgaggtcggagtgggtcatttgaggtcaggagctcaagaccagcctggccaacatggcgaaaccctgtctctacaaaaatacaaaaaaattgccgggtctggtggcaggcacctgtcatcccagccactcaggaggctgaggcaggagaatcacttgaacccaggaggcggaggttgcagtgagccaagatcatatcactgcactctagcctgggcaacagagctagactctgtctcaaaaaaaaaaaaaaaaaaaaaaagtgactgtcttttagaaagaaaaagaagaatctagtctattgctaaggaaaatgctgcttttgcagtaggaaaggcatggaacaggaaccaaaaaggccgttcagattggccagatgtattgctgctagttgatgctatttatgggaaaggagattgcaaggcagagggctccagaaaaagttaacttctggttacagagaaatgcaagtgaatgaaataatttttcgttctcagggaaacttcctgttttctttggaagatgttaattgttcacacctttcaaactgggtggggtgaatttggagtggctgggggtacttttgagtcctagcagcccttcattagacagctgtttgggggagatatttctgagtgcccaacccacccccgcccccccaagaataaaacagatggggagggaaagaccttgattcttggttctcttgagctttataacattccaggtcacctgtatctttgccagtgatggcgtgttagattacagcacaaaaggcttctagattgccatcaccttgttccttgatatgctgcctttgaggtctcttttgctacttggaaaccaagtagcaaaagcaaaatgacgttgaatgggctggttcacatctcttaggactctttgcatggctctgaacatgcagaagatgattactaaatatttaattgacttttcagactgaacctctcatgggagttaatgaggcaatcaattaaaaattaaaagaaaatttaaaggaatttcctaagaagcaggtactttgctttttccttacagaaaagaactgcaggccaaacatcctctatcaggctatcaggaatatagaaggtgatgaagtcatagaatcataaaaagttggaacagtgtccaggggttttaccagaaacccatgaacttctagtccttgattctctgtgtattggaatattttttccgagatcagtatctgtagctttgataagtttctcagagggatttgtgacaccctccccaagattaaaaattgctgatctgtctgcttacccacatacctggtgccagaatccgctctgcataattcttaccttagcccactttctgcacatcttctgtggaactcatcccagtattttcagaggcaacccatttccttcacttcttaaaatataaatgaatatatgtctttaattttttaatttttttagagacagggtctcaccctgtcacccaggttggagtgcagtggtggaatcatagctcactctaactgcagccgtcggactcctgggctcaggtgatcctcccacgtaattataggtattagctactatgcccagcctaaatgtatttattttgttgtatttatttatttatttatttatttatttatttatttatttatttttattttgagacaaggtctcactctgttgcccaagctggagtgcagtggcgtgatttctgctcactgcaacctccacctcccaggctcaagtgatcctcccacctcagcctccagagtagctgtgactacaggcaagcaccaccattcctcattaattttttgtattctttgtagagacgaggttttgctcaggctggtctcaaactcttgggctcaagcgatccacctgcctcggccttacaaagtgctgggattatagtcctgagctactctgcccgtaaatgtatttatttttaataagggtgatccatgtatgtggaaaagagtattaaaaagctataaaagtatcaaaacattatgttgtgtgcctaccataaatatattcaatttttacttgtcagtctttaaaaagctataaaatggatcaggcgcagtggctcacacctgtaatcccagcattttgggagactgtgttgctcataaaggaatacctgaggctgagtaatttataaagaaaagaggtttatttggccagatttggtggctcatgcttgtaatgtcagcactttgggaagctgaggcaggtggatcgcttgagcccaggagttcaagaccatcctgggcaacatgatgaaacccagtctctattaaaaatacaaaaattagggctgggcaccgtggctcatgcctgtaatcccagcactttgggaggccgaggcaagcagattctagtgggtgtgtggtggtacctcactgtggttttggtttgcgttttcctattgacaaatgatattaaatatattttatgcttattagtcattcatatatcttctttggtgaatttctgtacaaatctcttgtccatttttaaatcggattgtcattttcttattaagtgttctttgtatattctggatataagttccttatcaggtatgtgatttgcaaagaattttccactagtctttggcccatcttttcattttcttagtggtatctttggaagtgtaaaagtttttaaatttttatgaaatttaatttattataatttttttaatggattctggttttggtgttgtatctaagacatttttgcctaacccaagatcacaatgatttcttattttttccgtatagaggtttttgagttttagcttttttgtttagttctgtgatccattttgacttaatttttgtgtgtatgttctgaggttccatgtgcatatggctacccagtggtccaagcactatgttttgaaaagacttatgtttctctattgaatttgccttgtcagctttgttgaaaatcaatttagtataaatgtaaagatttatttatagacttttaattattttccactgatctttatgcatattcttaccacactgtcttgatattgtagctttataatatgtttagaaattatgtagtataagtcctccaattacgtttttaaggttgtcttagatgttctgggtcctttgtatttccatataaatgctagaatcagcttgtcagtttctacagaaaaacctgctggaattttgataaggattgcattgaatctatagatcaatttggagagaactgacatcctgacaatattgagtcttctagtccatgaacatggaatatctccgcaattacctttgttcatttctcagcaatttcagaattttcaatatacaagtccttttaaaaatatatattcctaaatattttattctttttgatactaagtggtgcgttttttttttttttttttagttttagttttggattgttgttgctagtatgtggaaatacaattaatttttctatattgatcttatagtctgaccttggttaacttgtttattagttctagtagttgttttgtgtattccttaggattttctagatacacaatcatgtgatccgcaactaaaagcactttttgcttatttcttttaattttttcccctatgcttcttcagggatgcccttaattattaatgtgtttgctttagtgcagtgacttatagtatagtgttgaatggaaatggcaagagtaggcatccttgccttgttcctgatcttaggggaaataattcagtttttcactactgagtatgatgttggctgtggatttttcatagctgccctttatctgattaagttcccttctagtcctaaattgttgagagttttaatgatgaatatgttggattttgtcaacagctttttctacatctattatgatgatcatatgatttttgtcctttattctgtttatctggtgtattatattaattgattttcaaatattaagccaacctgggataaacaccacttggtcatgatgtataaacctagattcaattttctaatattttgttaagaattttttcatctgttcatcatcatcatgaacacacaggatagttgtccgtagtttccatttcttgtgatgtctttgcctggctttggcacgtggtttttaaaaatttatttagacaagtgaaaaaaggctatacataaactacataaacccgctgtgcctctttttttttttatttttcttttttttttttattgatcattcttgggtgtttctcacagagggggatttggcagggtcataggacaatagtggagggaaggtcagcagataaacaagtgaacaaaggtctctggttttcctaggcagaggaccctgcggccttctgcagcgtttgtgtccctgggtacttgagattagggagtggtgatgactcttaatgagcatgctgccttcaagcatctgtttaacaaagcacatcttgcaccgcccttaatccatttaactctgagtggacacagcacatgtttcagagagcacagggttgggggtaaggtcacagatcaacaggatcccaaggcagaagaatttttcttagtacagaacaaaatgaaaagtctcccatgtctacttctttctacacagacaaggcaaccatccgatttctcgatcccttccccacccctcccgcctctccattccacaaagccgccactgtcatcctggcccgctctcaatgagctgttgggcacacctcccagacggggtggtggccgggcagaggggctcctcacttcccagtaggggcggccgggcagaggcgcccctcacctcctggacggggcggctggccgggcggggggctgaaccccccacctccctcccggacggggcggctggccgggcggggggctgacccccccacctccctcccggacggggcggctggccgggcggggggctgaccccccccagctccctcccggacggggcggctggcagggcggggggctgacccccccacctccctcccggacagggtggctggccgggcggggggctgacccccccacctccctccgggacggggcagctggccaggcagaggggctcctcacttcccagtaggggcggccgggcagaggcgcccctcacctcccagacggggcagctggccgggcggggggggtgacccccccacctccctcccggacggggcggctggccgggccgggggctgatgcccccacctccctcccggacggggcggctggcctggcggggggctgaccccccacctccctcccggacggggcggctggcctggcggggggctgaccccccccacctccctcccggacggggtggctgccgggcggagatgctcctcacttcccagacggggtggctgccgggcggagaggctcctcacttctcagacgggggtgctgccgggcggagaggctcctcacttctcatacggggcggctgccgggcggagggtctcctcacttctcagacggggcggccgggcagagacgctcctcacctcccagacggggtggcggccgggcagaggcgctcctcacatcccagacgatgggcggctgggcagagacgctcctcacttcctagatgtgatggcgtccgggaagaggcgctcctcacttcccagatgggatggcggccgggcagagacgctcctcactttccagactgggcagccaggcagaggggctcctcacatcccagacgatgggtggccaggcaaagatgctcctcacttcccagacggggtggcggctgggcagaggctgcaatctcggcactttgggaggccaagacaggcggctgggaggtggaggttgtagcgagccgagatcacgccacttcactccagcctgggcgccattgagcactgagtgaaccagactccgtctgcaatcccggcacctcgggaggccgaggctggtagatcactcgcggttaggagctggagaccagcccggccaacacagcgaaaccccgtctccaccaaaaaaatacgaaaaccagtcaggcgtggcggcgtgcgcctgcaattgcaggcactccgcaggctgaggcaggagaatcaggcagggaggttgcagtgagccgagatggcagcagtatagtccagcttcggctcggcatgagagggagaccatgaggagagggagagggggagggggggagggggagagggggaggggggagggggaggggggagggggagagggagagggagaggcttttttttttctacgtaatagcttatgttggcagtacttcagtaacagttctaccttctatgtaagtatatatcactaaattaccctccctaaagactgtaccagtttacctacatctaggctaatcatactttttaaagctttataactctgttaagcaaaaaatgagatattattttgacctacagtttttaaattatgaatgatgctgagcatctttttgtgtttggccatttgagcttttttttttaactgcccattcgtatttcttttggattatttgtcctttatcagtttctaagtgtccttgtatattgaagaaagtagttcttggtcaagtatgttaaatgtttttacctaaactctttttctttctctttggtgtattttttcatttttttcccttatacatttatatatacattttctttataccttctggattttgctttattcttaggaaactttccatgaagattatttaaaagcatatccatattttcttctaatacttctattttaattatacttgtaagtcttttatgttcttttcaccagtatcaaacactttggatagctctctagctcacgtgttctctctctcatatatatatatatatatatatttttttttttaaagagatagggtctccctctgtcatctgtgctagagtgcagtggcacaatcatagctcgctgcaacctcaaactcctgaactcaagtgatcctcctgcctcagcctcccaagtagctaggtctgcaagcccacttcaccatacccaactaatttttaaataattttgtagagacaaggtctcactattttgtccaggctgttctcaaactcccatctgtcctcaagtgattctcctgccgaagtgctgggattgcaggtgtgagcctccatgcctggcctgggtaggtctacattttaatgtttagtaaaactagcctgccttcattatttctcttttcaaaatcatcccgaagtaacggacaaataccaaattgactacaatggtttgttaaaagaaaggctttgaattgggggagagacaagtgagacaaacaatcagaggaaaataattggaaagggatggtcaaaggagaaaaataagcagttcatctgtggcagtacagttcttcttgaacacctctaatcgtgacctcaaactgtccctaagcatggttcccagcctggtgatagacctctgttcacttggctgtgccagtctgggtggaactggacttacttcactttgcagataacttgctgtgtgaccgtgggtctttcagtttccctctctgaccccctggattatatgacctctgaagttcttttaaaaactttttttttttttttagatgaagtctcattccatcacccaaactggagtgcaatggcacaatcttggctcactgcaacctctgcctcccaggttcaagcaattctcctgcctcagcctcccaagtagctgggattacaggcgtgtgccaccacgcctggctaatttttgtatttttagtagagacagggtttcaccatcttggtcaggctggtctcaaactcctgacctcaggtgatccaccctccttggcttctcaaagtgcttggattacgggtgtgagccaccgcacccagccctacaaattgtctttttaaccccatcaaacccaacttggaatggaactttgccttgttttgttttgttttacttttacgttactttggttgataaaatgtcaaatattctcaagggaattatgaacttcttgagcttcaagggaggtcatgagacctctgattcaacctgttcatcagggcagagacctcctctgccacctcctcccatggtcactcagctcacggtgacggttgcatagctttcctgttagaagagcccttagagtgggcccactgcatctcccttgcagtgtcctccttggttctgctttcttgtgcaacccaaaacaagtccaccccgccttatcaagcacctactatgtgccaagtgctctgtgaactttatttaatctttaccaccatcaccctaccatgaggttagtagtattttcctagtttacagataagaacccaagactcaaaagagttatacaaatttacccaaagtcacacagctaggaagtggtaggtttgggatttgaattcatgtctgtatggccctcaaagcctgtgctttttccagtacaccagtggttttcaaagtgtgatttcaagagcagcagcatcttctgggaacttgctagaagtgcacattctcaggccctgccccagacccaggtgttttagtaagccctcctggtaatttccatgcatgctcaagtttcaccactgcatgtcatgtgctccgcttcggtacctggctgctgcttctcttcacatttgaccaagaatttataagtgatttctcttttttctttttttttttttttttttttgagacatagtctcgctttgtcacccaggctggagtgcagtggtgtgatcatggctcactgactcaggtgatccctcccacctcagcctccccagtagctggggctacaggcacgtgccatcacgcccagctaactttttgtattttgggtagagatggggttttagcatgttgccaaggctggtctcaaactcctgggctcaagcaatccacccacctctgcctcccaaagtgctgggattataggcatgaaccaccgcaccgggctagattatttcatttatcgttattagatgtcaaatctaggactggatattactgcgtctccagagcagaaatgtgctgcacacagccctctttcccgtaaacacacacacacacacacacacacacacacacacacacagtagccagagtaacctttaaaactgcagatatgatttattccttttctacttaaaattcctgagtctcctcactgcactgagaacaaagcccaacacttgctactcataggatggtccatgaaccaaaagtgtcgtcattacctaggagcttgttagaaatgcagagtctcaggccctacccagaccttctgaatcagaatctgcattttaacaatgtcaccaagtgatttaaatgcacattaaactttaagaagcaccagcctatatattacctgccaaaaactcatagttgccaccaggcctttgcgtctgtgttttgctctttctggaacccttctctttttcctctcgcctcccttcaggtttcagggtagacttaagttcttagatttgcactccttccctgccccaagactgggtatattgctgctcccatgtactccccaacatattgttcttagcctcttaacttgctgagagcatctgggacctagtgttgtgatgggctgatggctcatctgtgtctccccacccgcctgaaagctccttgtgggcatgtattcttgaggctggcacagtgcctgacacacagtaggtgctcaataagtagttggtgaactaatttctttttttttttttttcctgagacgaagtctcgctcttgtcccccaggctggagtgcaatggcactatcttggctcactgcaacctgcgcctcctgggttcaagcaattctcctgcctcagcctcccaggtggctgggattacaggcgcctgccaccacgccggctaatttttgtatttttagtagagacggggttcaccatgttagccaggctggtctcaaactcctgacctcaggtgaaccgcccgcctcggcctgccaaagtgctaggattacaggcacgagccaccgcacccagcctgttgaactaatttctgtcctggtttgaacatgggctttgggctcaaccaggctaaatcctgtttaatcctaatattgttcactgctaatcctgagagcctgtctgactctcagtttcctcatctgtgaaatgggaataataagagtccctacctcataggattgttttcattgagttattccatggacagaacctagaattgtgcttagcacgtaattagcattcaatacatgttagctgccattgttatgaacatcatcgttacagtctcctcatttgtaatgcaattcatctgcttgaaaagagcatccttgttcctccactttctggctggatgggcaagttacttaacttctgggtctctgggtctcagattaacaccatctgcgaaatggtgaccaaaatctccaggtacctgtagttgtgaggataccacaaatcaatgtttgtcagtgcctagcagggcgcagggacttggtaagtggaaagaaggaacccggtctgtcactgtgccttgtgcttaggaggtgctcagtgactctggcttcttgttgttttttggtgttgttttcctgttcgggcattcttgttgtgtctttttgtttttgtttttttatgtgtatacttgctccattggtttgagactggaacaaaagtgtattgaagtctttcaggatttgcttttcattcctctgcaacctgagcttcgcagagagcccttgagttccctagggtggtgtctctcaactaaatctggaggattctgtttcaaaagaaggtagaactgcagtaactgcttagacttaattggcttgataaccagaggagattgtgatcccctgcactggtttcaaatcacctatcagatgagacaaaaaggtctggtgtccagcttcttaggagacattcagaacacaggttattgatgagcaagaaataatgataatcatacttacatataagggttgtggctaactgcttattaatgctttcaaattcatgttcttttttgagttccacttctaccacatgaatccatcctagtaaatgaggacacagcccagcaaagttgaagttgattgcccagtgctgcacagctgaggggagggtataactccctggccttattttggggccccaggctcagtgctttccctagcatatgatagccaccccattattggttgtcaagatgcagttttaaatctagtcaaagagaaatacagaccactacatcccttctgagaggtttgtatcatctgggatagacacttctacctaagcagtggtttttgaccctgactgcactttaggatgacctagagcagtgctgcttaaactttaactcagggaacttgctgaaatgcaggttctagggtagggcccgtgattctgcatttcttttcttttttaaaataaaatttaggaggtaccaagtgcagctttgttacatgggtagattgggtagtggggaagtctgggcttttaatgtaaccatcccccgaataatgtacattgtatgcagtaagtaatttctcatccgtcaccacccctacccttcagagcctccaatgttattattccacactgtgtgtccatgtgtacacattatttagctcccacttataagcaaggacatgcagtatttgacgttgtttctgagttgtttcacgtaagataatagtctccagtttcatccatgttgctgcaaaagacatgattttattcttttttatggctgaagagtattccattctgtgtgtgtgtgtgtgtgtgtgtgtgtgtgtgtgtgtatacatttatacagtgtcccaagtcctaggtctccctgaaggcttagaaagaaaaggtgggaggtgctgctggaaaggcactggggccggtgggtggaagttcctccataccaagctaggattactctaacctcagtgttcagaacagtgatgttttcttttgcctcatttattatttaagtggcatacatactatataatcatctaagaaaattagaaaatatagatacacaaaaaaggaaaaaagctcatcactaagacattttgcctcctaaatatttttccaaagataaaaaaaaaaaggaatcctgccacacagtgttctagctcctgcttttactatgtaaatctaaagcttgaacattcctactcaagaaatgtatcggccaggtgcagtgactcacacttatatctcagcactttgggaggctgaggcgggaggattgcttgagcccagaagtttgggaccagcctgggtaatatagggagacactatatttacaaaaaatcaaaaaaattgcggtgcatggtggcgtgtgcctgtggtcccagctacttggcaagttgaggtgggaggatctcttgagcccaagaggttgaggctgcaatgaactgtgattgcaccactgcactccaccctggacaacagagtgagaccctgtctcaaaaaaagaaaaacatgtcatcactttcaatgaccatttaaatggacatataataatttaacccattccattaacatttgacattttactattgtaagtagtgaatttttttttttttttttttgaaatagagtctccctttgtcgcccaggatggagtacagctcactgcaacttccgcctcccgggttcaagcaattctcctgcctctgcctcccaagtagctgggattacaggcatctgccaccacacctggctaatttttgttcttttagtagagatggggtttcaccatgtagtccaggctggtctcgaactcctgacctcaggtgatttgcccccaacttggcctcccaaagtgctaggattataggcatgagctactgcgcctggccagtagtgaactattttaaataatgttattggtgaacaccctttcatgtatacattttggcatacctgacgtatttttcttaacatgcctagaagcagaattacagagtcaaagagtatgtacttttgggggacttttggatacagagtgccagataaacccgcagtagtgttccagtttataatgcctatagccatgtgaaaataccaagatggtgacattttaatatctaaaatagacagtgccatcggatacagccattagttctaagttgaacttctgaattgcttttggttgccaacttcagtattatattcaaagattctagcatattacgaaaatatcctttgctgtttttcatctcttgatccttctaagataaattggtgtgtgatttgttgatagtatctttgtgtgaggattgtttttcaaaaatttaagcttgaggtgttttgttttgttttttaacaacttttgggtggctgtttttgccaacagtacaggatttgccttctttatattttggttaactggaattcaggaacagaggggaattagaggaaaaaagagggcagggtttatttctctcacatgacacacttgcgttctaaccaatgacacatgagggttggcaaaagcttccaatgaggaagggccagaatcttcagatgcctagtcaggtggaggaggtcctctgacgcagaggaaatcagatgctgtacccagcctgcagttggtaggctttccatcactactcagagagaaagaagaaaaatctatttgtttttgtattcaagccaacccatactatgaaaccctcccctttgtaccagcatagaatgtctctagagagattttcaaggaactggtgatagcagttgtccatggggacctggagtgggaggatttgtttttcatggcatacccatttgtactgtttgaattatttactgtagtttgctttttcaaaaaatgttcacgctagttgcttttaaaaagccttactcgcttatggttatgcaggatgttagcattaggggaaactgggtgaagaatgtatgggaaccctctgtagtgtctgtgtaactcttctgcaaatctaaatttacttaaaaataaaaagttcttttaaaaaaaaatgacagagggaaaaaaatactgtcttcctatccttcctatccaaattgccccatgaggcaatttacctactagtcttgtcatttcttttaaagattttcctgctctcctgattcatctggcctcctgattgccaaatacaatacacctgtcttagccatggcactgtgtttactggagtcaggctttcctaatgaacatcagctggcagatacttgtaaacgttcacaacaaatcggaggaaaaactccatgaaaatattgcttaaaagactttgaccaagctatgtgtctgcaaaaagtgtactgaattcagaaccttttacaaattcagaaacttgtaaagccatttttccctcaacttgtagtccaggtaaaagtacaggtcagtctacatttttggcaagcctcctcagtgatcctgatttcctataaaactgagtttcacagagtcatcagagtgtgtgtgtgtgtgtgtgtgtgtgtgttggttagttggttgcttggttggttggatggggtgtaacttgatggatgggagggctgtggagacaggtgatcaggaggctgtggccaatgtccaggtgggaggaaataagcatctgaaatgcaacagcagtgaaaggttagggagagtagtcagatacagaaactgacttgagttggtgatttaggcgtgtggaagacaaaagttcgttgttcagactgcgtagaaagaagagaatccggcagcttttctagttccttgcaggggtgaagcactattattaagggaaagagatgcaatggacctttcttgcctttgattcccaggtgcctatgctgcatgcagatatttcctgagtccccatgctgtgccaggcactgttcgtggtgctgctttcctagagatcacattcaagggtagggggacatgcaatacgcaaataaacatatacatatagtacatgtcaattagataagtccatgaggagaaatagataagggactagagaaatgggtaatgggagccctgaggttgttttttagatagaatggtcagtgcagacttctctgaggaagtgatatttgagagacctgaatgaaataaggagatgtgccattgggcgtggtagctcacacttgtaatctcggcactttgggaggccgaggtgggcagatcacctgaggtcaggagttgaagaccagcccgggcaatgtggtgaaaccccgtctgatctaaaaatagaaaaattagccaggtgaggtggtggatgcctgtagtcccagctactcggtaggctgaggcaggagactcacttgaacttgggaggcagaggttgcagtgacctgagatcatgccattgtactccaacctgggtaactccgtctcaaaaaaaaaaaagaagagagatgtgccgtgcaggtgcctgtgggaagggcattccaccagaaggcacagtaaagacgaaggccctgaggggtgcagaaaggtttgttgtcaggacaacaaggaggcccgtgtggctgagctgagcgaggaggagagtgggaggtgagagaggccagcacggttttggagaaacttgtaggaacatctcttggtaacataggagcttttgacagcgtgaactagttgctatacagagaaatgggaattaattaaatgtcctggagctttatttcctgccagctatcctgggagttacacactataaatggttaaaagaacattgatccagaagtggggagacatggctcctgtgtgatagtcttcccttttgcccagatgttaattactttgtggctaactcctggaagtgcagaattgtcctgtggcactcttgggagcatttgggagagaacatttatgaggtcttcaggcttcatgggtcagagggtggctacactgggtcaattaaagcaacatgaaggtggtatgacttgatctgcctcagaggatcttcttcacttcttctccccaatccaaccctggcctctcttctgagcaggattggttgccgtggtctttactgcttttctccctgatgtgtgaaacaagcgccttctatgtgcctggggtcgcgcctatcaacttccaccagaacgatcccgtagaaatcaaggtaagtgtgttcctggatttttggagcctctgtgctaggcagtgtgtctggagcaccatggtgagctgttcgtgtccatcctgtggttgcagagaagaaagaatagtgccagttaccccggaactctgcctctccctctccctgtgcctctggttctcggtcccctctctgtttctggttctttctgtgtctctgtccctgtgtatgcttgtgtatatttgcatctcggtctctttctcactctcacttttgctttcaagtattctgtctctgtcatgtatgtgtccatctctttttgtgcctttgtcttactccacctgcctcttctttagcatctctgcctccctttctcacctgctccatcttctctgttaccagctttgtcagcataactcctagtgtctgctcatattgttcatacattgtgaacgtctcttttccttggcagtcagacttgtaacttgcaggaacagtcattaaaataacttttactgagggttatttacatgccaggcattgtgcatggcttagctcaggttgccccccaagaacccactggggccaattccatatgttacacagatttcctattcattttacagatggggaaaccgaggcctgggaaggaaaattaacatgttcaaggtcacatagtgaggaagacatagggttagttcaaaccccatctctatttagaggagacgtggtctttctctgttgcctaagctggagtgcagtggcgtgagcatagctcactgcagctttgacctcccaggctaaagtgatccttctgcctcagcctcccaagtagctgggactacaggtgtgcaccaccatgcctggctaatttttttttttttttttttaagtagagatgaggtctcactatgttgcacaggctggtcttgaactcttgggctcaaacagttctcatgcttcagcctcccagagtgctgggattatcgggcatgagccaccacacccagcccaagaccccatctcttaaccactgcagtaccttcttcccactacctctgtcaaaagctccctccagagcagaggagtggcctggaggtaccagagctgctctggcttccagtcccacatagctaagtatgtgagggtggacgccttgggtgggaagagagggagtgggaggcaacgtaaaggtgggacgcatctctctgtaacgtgcattcttttctcattgtcctgagtgagaatgctaagaaacacaaaattgttaaaacagactttttggccatttttcctcaagcaattcatgaaatgtttaatagaggtccttaatccctgcagtttcacacccggaaagctctggaactcagtttttccaagctcactgaaggcaagaactgaccagaactgaacatgaagctgtttattgactttttctattccacttaatatgaatatctttgcatttctctgcacaaatagttatcgaatatgaggtactgtccagacccagcttggctatggtttgtataccacattgccttctaaaatctggaaattttctttttcttttcttttttttttttgtgagatggaatcttgctctgtcacccaggctggagtgcagtggcatgatctctgcttactgcaacctctgcctcccaggttcaagcaattctcctgcctcagcctcctgagtagctgggattataggtgcacaccaccatgcccagccgatttttgcatttttagtagagacggggtttcaccatgttggccaggctggtctcaaactcctgacctcaagtgatctgcccgcctcaccctcccaaaatgctgggattacagggaatccagaaaatttctaatcccaaaaaagagttgaaaaaagattgtagacctgtattccaaaaatcttttttacttttaggtggtgtatgaggaatggtcaatagttcctaaatagtaaaggtagttttacttacatttggattaaaattttattttttgtaacatttcgatgggttctattttgtctgtggtttccagagctatattctgtgtgcttgtagcatttcctaaacattcttcttcattgtcttaaaccttatttttttatggctttaccatatttaattgaaagaatatatcatagtttattgataaatttcccattgcaggagctttgagttgaagttatttttcatttttcctctcttctctcattcagcaaacatttaatgagtacctactttgtgcctagctctaaagcactggagttacagaggtgaccaaggcacacgtggtccttgtccttatagagcttaaatcttagatgctaatgggagaaactgattttttaaaaaacagggaaactaattaacattttatcagatatgctatgaagtaaacagttgaagactgacagtccagtggataccggggagttcctttagataccctggtgaggtaaggacacaggcaaggggagagctgagacctgaatatgaggagaagccaggcgagcacacaatagggcagaaaggagcagtaggtcaaagcctgaggcaggagagagcttgactgactcgaggagctgaaggaagaagatcactatggttatgaataaggagtgaacttcgttgctcctaaaatgctttttttccttatttggagttatttccttaggaaagatgcccaaaagtgaaattgctgtgtcaagggatagtagcatgttcaagactctcacaatgtattgaatttggttgtgattctcaactatatctgtagtgtagtctaaaatgaatgaaatgtgaaataattcagaattgtgggcagtacattatatagtgtactgctgtcatttctgctaattcgtttgcctattagttaatattaccaagtgtactaaagatgtgtgggtaccagggaggattattggtcatcttggtttctgctggattcccatcaggctgtgaagctcaccagctctcgaacccagctaccttatgaatactattcactgcccttctgccagcccagcaagataacctacaaggcagagaatctgggtaagttcttctcccacactgctgtcaacttgtccccagggggaacccagcatgatttttataatgataacaacagttaactttgctatattctagacactggtctacattgtttgcatacctgttagcttatttaaacctcataacagccccggggagacagttgctgtgtttattcccattttgcaggttaagtgacttgtctttgtttatactgtgggcaaaggcatcctctgttttcttcacaaaacagccagagtgatctttgttttggatccacagtcagtcttcagacttggagcacttggcttctatttacaccgcctcttcttgatttctagatagctcctctcttgcggcttcatcacctcctctgctttaaatggaaagagagagcgagtgcctctgccctgaatgcaagcagagatgccaccacagttcttgctgagctctgcaggactcatgtcaaataatgtgtgaggcacccagtgcagtgtctgacacaagtattccataactagtagccattttattctaatttaaataattctccatttgacagaatttcaggtgtagaggtgtctagtcgtacacagttattagtgcctcctctgtgactgtgttaggtcctggagataaaagcatggaaaggtgtctccctgacctcagggaacttaagagactttcttttcttacaccttaggaaggagaaaggagagaactggttcttgagcaagcccctgaaagggctgccttctccgtcagggctacgcatggctcagatgtttctggaacctctagctgacaaatttatctactgccaggtattgggggtcctggaccagttggaggcaggccttggagccagtttaaccaaaattgggtaggaccatctccccctaataccaactgtgccgaagtcttgccttgtagcgttgaacagagattggcctcagagcctgggctggcctctaccaactgtctgcagtggtgcagcttgtggccctgccacttaccatctgtggaccagtgcctgcctgccattgccctcctttcctcaccacaccatgctatcctccagccaccttgcctctccccgggaagcctgacccacttggtgccccagggtcctgatatcaggcccctcacaaatgtacctcccttctcctgggagctgctgtggaccctttggcaacccaaggctctatagttaggcactcttagtatgatcctgggtgaccttaacctctctgaacccctgccaaatcttcgtgaagctggggaaagttcctgcctcatagaaatggagatttctgtatacaaatgttatcctgccatattgcatctcattctgtctttgtagtgcctgccttcatggcctaagggctctttgactggagggattgtgtctcacattcccctctcttctcagcttctagcccagtgcctgacacatagtaggcattcgataattgttagtgttctacctgagtggagcaaaaccatccttgattgcgtgactgttggattgtaagccatttacatcatcatcctcatcatcatcattaatacctagagggctcatcctatgagctgggcactgttctaagcattcctgtgccttaacttacttaattctcacaactctaacttagtaattctcacaatagcatgtagattctcttactctccttattataaataagggaagtgaggcacaaggaggtgaagtcactcacctagtaagtgacggaactccaggaactctggctccagaatccatgcccaagcaccacactgtacagcagcttctgtgactctgatagtaactctgtaagctgagtatttcatagtagagggaacagcagcctcaagggtttgaaagacttagtcagggtcacatggccaataggtggagaaattgagatttttaactcaggttcttttaccctaaagccagagttctttctgttgtcgcaggctgccttctccagaaaggcccatagggctgtctgagggctgtgctaatggttgtcacattgatggagatccatggcatggtgtatgtattggagcagctttggcaggtgttccggatagaaccctggactctttgggaggctccacattcatggcttactgctcattgttaaaaggagtacttccatgtataaaatgagccatttcgctcatgcctgtaatcccagcactttgggaggccagagtaggcggatcacctgaggtcaagagttcaagaccagcctggccaacatactaaaatacaaaatttaaaaaaatttgtaaatttgtaaatctctactaaaaatacaaaaattagccaggcatggtggtgcacgcctgttatcccagctacttgggaggctaaggcaggaggatcgcttcaacccaggaggcagaggttgcagtgagctgagattgcgccattgcgctccagcctgagcaacagagcaagactctatctcaaaaacaaaacaaaaacaagaaatagaaatgagccatttcctgaccattatgtcccctttcttggctaaacttaatttttaaatatcaagaagcgattccactgtacttggtctgcagccctgttcctctctgtagctctttctctcctcaagcaagatcctcattgacaggagatgaaataggcagtaggaaatggtatagaggaaagaggccagggatttagcattaccaccaccccctcatatcaccacgagcaggtctctgatcctcagcttgtcatctataaaatgccatttcagcagtgggctctgcagatatcttactgtgtcctcgctcttcactggccaatccatccctgggttttgcagactcacctgcattgccagccttccaaaacagggtggaggggtgaggccttcatccatgcccttcctcaatctctccctctcctgagtgcctcctccacactgaaagcattgcttgccagggccgctactttgcacagcagagtgctggcgcctacagcggtgtagctcgcggccctgccatttaccatctgtgggccgataacccccaacttccatctgtgccctgacctctcctctgcgcctcagatcttgatatctaagtgcccacttgatatatccaaactgaaaatgccttcgatgtaaatttgctgttcttcctattttcccacctagaacctggttgtagaaacctcagagtcttcctaatatgcaccatccctcactcatgccttgtttacagtcagcactgcttcccctggatttcacctccttggagctcctgaatctgtgtactcttctctaccctcaccagcacctgttccagtcaccggtgtcactcatgcatgactgactgccatcactgccccccaccaccaccactgctcaccgccagttccttgcatcctctgttttcttcacaaaacagccagaatgatctttctggaaccagactcagataacgtctttctctacccctgttagaaaccttcattggattttgttgctttctaggtcaaactggtcaagatcaaactgtgtgtcccacaggccccctgagtactggcccatctctgcagctcatctgagccttctgcactgtagccacacaggcctttcaggttcagtgcctcccccaccccaaaggggcctttgcacatgctgtcctgtctggaatattctcctatttctttgctcagttaacatctctcttcctttcaagtaccccttcctcagggaagctgtcctagacccactcccctgtgtctgcagcaagttatatattctcattttgctgattattcagcaaagtctatcttcctgctaggccatgcactctatgagtacatctattcaactttgcatctttagggcttggcatgtagccagtacccagtacatgttcacggatgaatgaatgaatgactagatgactagggagagtgccctgtcgagcagatccacactggaggaaaagtgcgagaccaagtgcatgtggaggtgttaattagtcttcatcttgtccatcaattgttgaacagctcagaatgaaagcaccatggggtttgcttgatagtccctaactgctcagtgcctgttagggtgacatctggcagcagttactctgaggcaaaaggcacacaaggggtgccacttcattgagtcaaaagacgttttgcctgaaaatctcaggtgctggatttcaccccactcccctccctgctggaaccaggatctgaagacacagagataaataggaaacagtcttaacagtaacgagctcatagtcaggtaggggagccagaaacatgactgtatcagcacattgtgcaaagtaaatccttgacataggaacggatgctgatgataaaagagcgtttgatgcctgcctactctgtgcctgctactttattggattgacttcctttatttctcactgtaaccctgtgaggtggatactgttattatcccattttatggatgaggacattgaggctcagtgagatggagtgacttaccaagactgctaaggcaggcagccgagagtcagagtcatccctccactgcataatgctgccctcacacagggcagtcaggggagggagtgatgggcttgtcctgaaggggttagggagggcttcccagagagagtgaaatggaaactgggcttctggggaggccaggagcatggggcagggaactctaggagaaggaagcgactgaggcccagaggcatagaaggatgtgatgcttggctgggcgcggtggctcacacctgtaatctagcactttgggaggctgagatgggcagatcatgaggtcaggatatcgagaccatcctggctaacagggtgaaaccccgtctctactaaaaatacaaaaaattagccgggcgtggtggcatgcacctgtagtcccaactactcgggaggctgaggcaggagaatggcctgaacccaggaggcagagttcacagtgagctgagatcgtgccactgcactccagcctgggtgacagagcgagactccatctcaaaaaaaaaaaaaaaaaaaaaaaaaggatgtgatgcttgatgagtgctgagtgctaaggggtctggtagcactagagcccaaaggaggagggtggcaggtcgaggttagctgggaccgttgggcgtgaagcaatgggaagggcattggctgccaggctgaggcactgctgaagtccttgaaagcccatgtttgccccgcagtcctgtgtctctgtgactctgctgacctcagcaacctcagggctgaagctctgagcttgatctgtctctcttacggcaggagaggtgctgagaggggaccggattgtcaacacccctttccaggttctcatgaacagcgagaagaagtgtgaagttctgtgcagccagtccaacaagccagtgaccctgacagtggagcagagccgactcgtggccgagcggatcacagaagactactacgtccacctgtaagtcgccctgtgctccttgctgcctcaggctcacacaggggaggacactgacgggagaggcggtcgagagggactgagtggggccttcactttccagcattgctgacaacctgcctgtggccacccggctggagctctactccaaccgagacagcgatgacaagaagaaggaaaaagatgtgcagtttgaacacggctaccggctcggcttcacagatgtcaacaaggtagagtgtctttggcgtgctcacaggaccgggagccacacctcacgagtcctgagcacttggggccacagaaaaggtggggctcggccacagcaagtttctccaggtgccctgggcatgatggtctgtcagaggtccgagtgctccgggcaagtccctgggaggtgctacagggaggtgaagccacaattcttaggaagttaggttccatttttgtaagattaaaacaacataaaaaaaaaaaccgtggaacttcatcagtatgtaggagagagggctaagtagtggtcaagagcgtgcaggctccctgggtttgaatccttcctctcccagttactagttgtctaagtgaccctgagcctgtggttccttagctgtaaaatgtatgcagcagcagtggcggggtaaattagcacattcgtgtgagcccttcccagcacagccctggagaatcagctaataatgtgatgattatagccctgattctcttatctttctttctaaactgaaagatattagttagggaataaattacaaaagtatgtgttttgaggtgcagcccctgtccccaaagggcgtctgtcctaactgggaagagaaccgacagtgggaggctctaagtctccagtcccagctgcctttcactggccattaattgcaggcgaggtcagagggagctccttttacactcaggttgtcacagaggaggtgggccatgagaagttggtgggcttttgctgagtggagttgggggtggcattctagttggagtgattgcagggtagagactggttcatggggcggtgggcacaggggagtctaggtgaactcatgtgacttagatgattacacccagttgtatcagggtcagatgatagaaggccttgaatgccagactttgagaaatgggcttttgtctgataagctgcagggagcccttgaagagcttctgagtaggggagtgatgagaacagtgttttaggaaggttggtacaaccaggcatgctgggtgaggcaagggccctaatacctggagagtatccctaagtgatgttctgttgtgctttctctgttgctgtgtttcagatctacctgcacaaccacctctcattcatcctttactatcatcgggaggacatggaagaggaccaggagcacacgtaccgtgtcgtccgcttcgaggtgattccccagagcatcaggctggagggtgagtggggaggtgtggccggaggggcagggctggatgggcctgggcttctccacgcagggtcttcgcactcttctccctcctgagctggccgatgggctcgggtgtggcgtgtgggcccagccaaggtaggatcatggtattctcattagagaagacggggtgtgggggcagctgacagctgcagtgtcacgggctagacaccttactagtttaccccttcccagcaaccccaggaggtacgtgatgattacaaaggaagaactagaggctcaaaaggagctagtgacttggccaagaccaaacagcaagttggggctttgttgggcctcctcacaagaaccagccagctcaccctgggttgagaacaaggggccagggtacagacaaagcctgtaggcagcaggtttcttcgttcctctcccgctgtgtgagtgattggcataaactaaaatttgcccagggtcaacaggtgtgcgggagtttgagagtccagcacagtcctgatgggcctcacaggagctggtccggctttgcctcacctcttggcccttgatcatcacagtgtgctttttaattaagcagcatgcccaggattttgaccatgttggtggtatttggactttttttttttttccactgtggaacttagtgttcaaacaaaattagacacagaagtcccaaacatagatcctgcccttcaagagctccatagcacatctcccctgggagcttcccgagcgcagttctacgtttgcatgtgtgacgcttttgaggccacctgctcccccactggctcttcaagcttagagtctccctgtctccttttcttaccattttatctttttttttccccccaagacagagtcttgctctgtcacccaggctggagtgcagtggcgcgatctccgctcactgcaacctgcgtctcctgggttcaagcaattctcctgcctcagcctcctaagtagctaggattataggcgcccactaccgcacctggctaatttttgtatttttagtagagacggggtttcaccatgttggccaggctggtctcaaactccggacctcgtgatctgcctgccttggcctcccaaagtgcttggattacaggcgtgagccaccgcgcccagctcaccattttatcttaagcacctagcacagtacctggcccatagttggtgcttattatatgttgttggttgaatgagtagatggataacaggatgaacagatgagcaaatgaatggagaaaacatctgaatgattgatcacgaaagtgccagggctttagagatagactaaatgaatgagtaggcatgatggaatggatcaaggttttatgttgaatgggactggctggatggtaggtgaacgtttgaattgagtgaaggaacactgactcagggaggaactccgactcaggcccctcccttcccccatgcacaggcctctctgcagcccctaaggaccttcagaaagtcagggctctgaggaataattttcaaaaaccattgttggccaggcatggtggctcacacctgtgatcccagcgctttgggaggccaacacagaaggattgcatcaggccaggagttcaagaccagcctgggaaacataaaaggaccttgtccctacaaaaaaatgtcttaaaattagccaggtgtggtgacacacacctgtagtcccagctactccggaagctgaagcagaaggatgacttgagcctaggaggttgaggctgcagtgagctatgattgtgccattgtctgcgtgacagggcaaaactctatctctaaaaaaataaggtttaaaaataaaaaatgaaaaaaaaccattgttgcccattgtgctcccagtctccactcccaccctagaggctgggtctccgcgacaggcagccttgagggcagcccctggaatagcccctgggcagtggcactggccaccacaggaacagactgagtctgtgtctctctcagacctcaaagcagatgagaagagttcgtgcactctgcctgagggtaccaactcctcgccccaagaaattgaccccaccaaggagaatcagctgtacttcacctactctgtccactgggaggtgagaaggggctggagctcatgggcaggggaggagggctctggtctgtgtcaggttctccagcaggatgcctgactctaagtgcttcctcccacctgccaggaaagtgatatcaaatgggcctctcgctgggacacttacctgaccatgagtgacgtccagatccactggttttctatcattaactccgttgttgtggtcttcttcctgtcaggtgagagatctgtgggttgagggaaaggggatgggggttggggttgagggactgagacatcacatcatgtatgggggacttccagggtgttctgagggtcaggcgtaggtcaaaaacagacatcagggctctgctaagcatcaggtgtacataggtaaacaagactcatctctagagagctctagaactctggagagctcattcatggaggacagacacacctgagcctgcacacattcttgattcattcaacaagatgttgttgttgctcattctgtgccaggcactttgccagatgctgggaatatggtatgaacaagcccgacccagtctctgctcccatagagcctatattctagtggtgggagagaaacaaaaaagcaaataagtagtggagttccagatagtgatacattctatgaagcagatcaacagggtggccaaatacacaatagctgaggaaagtgtgaaggctctttggggaagacctttctttacgataaggagccaccatccagagacctgggaaaagtctgtgccagtgaggatcatggtcctgcagcgagataagctcagcaagaaaccgggtggtgagagggtggtaggcaggggtagaatgacactgatggtttcactatcatatgagaagcacagataatgctaaatactgtttattaaacatttaccaaagggccagctgctgaactaagcactttacaaacatttcaatccctgaagccctgtgaactaggcccgaaaatgttaagtgaactcaaggtcatatggcccattctcttaaccactacagtgctgcctagagagggaaacaggaaagtacaaatgggggtgggagtggctctgtactgttcagggtgctgggacgtgaagatgcccagagtgagcctcgaagcacgcgtaggagtcagtcaggatatggcggggcattctgggcaaaaaggatagcttgaagaaaggcgtgctgatgagaacatagtgaggccaggagccaactgaagcagcagatagccagaggtggagccacaggcagcccttggacacatgagctgagaagtcagtaggaccaagcgatggaacagctgggatgctcctctccccaggatacccctacccatcccagcaaccctttcctccccacctccatgctctgtgctctcctcccctggtagctggagtggagctcccccgagaagaggccttgaggtggctgcatagccagttcataatggagcaagccgtgcatgccagctgtcgcacagtaaaacatcatgtctaggagggcatggagcatgggcttgctggcagcgccaacttctcctcatcctcaccgccatctatttcaggtatcctgagcatgattatcattcggaccctccggaaggacattgccaactacaacaaggaggatgacattgtacgaggtcttggctggggagggatgaagttggatggggaggggaggaggaccgtgtgtgtgcatatgtttgtgtatattatcattcaaagaggaaacctcaaaatactaaaacagtttagtatactttttttttttttttttgagacggagtctcgctctgtcaccaggctggagtgcagtggtgtgatctcggctcattgcaatctccacctcccgggttcaagcaattccccacctcaacctcccgaatagctgagactacaggcacgcaccaccacaccttgctaactttttgtattttttagtagaaacggggtttgccatgttagccaggatggtctcagtctcctgacctcatgatcatctgcctcggcctccgaaagtactgggattacaggcatgagccaccacgcctggcctagtatacttttaatactaaaaatgtaataccaaaaaagtaaggaaaaaagttttattcacccaaagtgatagggatggcctttctaattttaaagcataaaaaccgtggaagaaatcacaaaaaatagttgattgatttgacattaaaaattgtaaaactattctgcatgccaaatacataaacaaaacagaaggccacaatggcaaacaatatctgcaacaaacttgaaaaaaatggcacagtttaaagaattcatgcaaaatctctttgttttaaaaaaaactaggtcggggctgggcacggtggctcacacctgttatctcagcactttgggaggccaaggcaggtggatcacttgagatcaggagttcaagaccagcctgaccaacatgtgaaaacttcgtctctaataaaaatacaaaaattagctgggtgtggtggcatgcacctgcaatcccagctactcaggaggctgaggcaggagaatcacttgaacccagaaggcggaggttgtagtgagccaagaacgtgccactgcactccagcctgggcaacaaagtaagactctgtctccaaaggaaaaaaaaaaaaaaaaactagaggacagtagataacttgaggttaggagttcaagaccagcctgaccaacatggtgaaaacctgtctctactaaaatacaaaaattagctgagcctggtggcaggtgcctgtagttccagctactcgggatgctgaggccggagatcacttgaacctgggaggtagaggttgcagtgagccgagatcacaccactgtactacagcctgggcaacagagcaagactccgtctcataaataaataaataaaaccaaaaaatctaaaatttcgaatgtaatgatgaacaggaaatttacaggcaagacactgcaatatgcccagtaagcaagagaaaactgtttttacctcaggaagaaccccacaaaatgcaggttcaaacaatcttgagaagaccgttttggaccatcatattagcacagactttttttctttttttaacagtactaattgttggtaaggttaatgtgaactaagcatctttccataccacccatggaagtataaattggtagctttctgaaaagtgattggcagtggatatcaagaactgtaaaacaggctgagcatggtggctcgtgcctgtaatcccagcactttgggaggccaaagcaggaggatcacttgagcccaggagttcaagaccagccagggcagcatagggagatcctacctcaacaaaaacaaaaaagaactaaaacaggcaacttgttttgcacagcaattcttctattatttttctaaggcaagattcaaaacaccaagacttggtatagaaatattacagctttttttttttttttttttttttaagagacggagtcttgctctgttgcccaggctggagtgcagtgacacaatcttggctcactgcaagctccgccttccaggttcatgccattctcctgcctcagcctcccgagtagctgggactacaggcgcctaccaccatgcccagctaattttttgtatttttagtagagacggggtttcaccctgttagccaggatggtctcgatctcctgacctcatgatccgcccgcctcggcctcccaaagtgctgggattacaggcgtgagccaccgcgcccagccagaaatattacagctttgaaatacaatgtcaagcttttattgacctgaagaaatgttcacaaataccaactgaaaataacaaagtacatagtgtgatcccaatgttattgtttaaagcatacatatacacatatatacataaaaggttaaaggaattatatcaaaacagtgttattaagtgggagtatcaaatcattttatttttatatcgttctgtttaaatttttctgtaataaacatgtattactttttgttcatttgaatttcatgctacataccaaattatttttactttttttattacacaagtaagaatgcatatttctttcataatcagaaaaaataaataaattgactccaaatctcaccacccaagaactcttacagttgacattttagtgagttgaggtatttacattattttcccacaaacgaggtttgtggaatttaaagagattttccttttacgcatctacaggcatcaggtttgtggcctccttttcttgtgacagtttcagataagcactttctcctatcacttacactcctgtgtcagagcagcgctggttggcacctgagggtgtcagctgtcaccttgggggtggtccctgcaagagctgcctccatcttcaacaaccagcctcactctggcccttcgctgcaggaagacaccatggaggagtctgggtggaagttggtgcacggcgacgtcttcaggcccccccagtaccccatgatcctcagctccctgctgggctcaggcattcagctgttctgtatgatcctcatcgtcatctgtgagtgtgcccagcggggccgggcatgggggcatggcttcctcttccaggtgcctcaaggagagaagggtgggcttccctccctggagaaagggaaccaagctcctggcaccaagtgggcatgtcagtatctctgggccagacaggccgtctatctcagcaacagccccagccccagcccaggactggtgattcacctcacagccatttacagagcccaccatgtctcctccatcaatgaggcaacacatcattgctgtgagcttggcctccttttgtagtcagaggccaagtgacctgcccaaagtcagtaccaggattaggattgaaatcaaatatttttttctttaacaaaaaccccactaatatatagtaattttagacagctttggagtcagtctgcctagatttacatctcagcctcatgcctccaagctttgtgaccttggacaggccacttgacctctgtgagcctccgtttccttatctgaaaaatagggaaagtaatcaccctgcagagttggtaaggtggattcagagacctggcatttgtggtgccctcagcccagcacctgactcactgcaagtgctctgtggaccgaaagctgcggttgagatttggccagccaaggcccagcagctgctgcacccctccgaaccccaactaagacccagtcttcccctgtagagggtaggggactatgctgttgagaagacaagggagggggagcctcatctgcccagagtcctcctgtcagcctgtccaaggtgggcctggggctggggctggggctagaggcctggtgatcagccaccctgcctttctctgcccttcctccctccctccctccacagttgtagccatgcttgggatgctgtcgccctccagccggggagctctcatgaccacagcctgcttcctcttcatgttcatggggtaggtgtgtctgagtgggctcccgggggcggcacaggcctcctccacaccagctaatgggtccccttggtgtggatccctgccattttcccacagggtgtttggcggattttctgctggccgtctgtaccgcactttaaaaggccatcggtggaagaaaggagccttctgtgtgagtgtcctaaaccttctcttgtttggtgggaagcagagaagcttcttcctgggctcctcaggagaaggtaggcaggtcctggtggggatttttgggccagaagctgagcagcagcaagacatagcaggagcagcacaggtccaagggcaggaatcccaggctgttacccacaggctcgcagcagaacctcccagggcctccactgccccatttgtaaaatgagggatttgaacttaggtcatttttagctgacattgtctgatggctcaagcaagagaagaaataggggattcagaataacaagatttagaatagcagggcagctgagagaacaccctgagtaaagagggaattgcctgcctaagcctgaagaggccagacccaagttcctgtcagcccattttccaggctggtgcctgcatttctctttggtgaggattgctgcccttctctggcctcctggaggtaaggagagttcttggcagcagaaaagcgcgtagcaaccagagggggtctcgagattgacctcacctcccagggatccccgagccccttctcctagagcgagtgagtctcttagaggactaggaagactcttgggtgcccacactcagagaagtctctgggcccaggattctgaagccattctcaccgctgtcaaaagctcaaggagagctcaggctgtatcagttctggctgcgacgcttctggcacaaagtaagccctcggtaaagaaaagttgtgaccgtgactattttgggaggatcaaagaaaggttcctgaattgttttttgtttttttattgttgttgtttgtttttgagatggagttttgctcttgttgcccaggctggagtacaatggcgcgatctcggatcactgcaacctccacctcctgggttcaagttattctcctgcctcagcctcccgagtagctgggattacaggcatgtgccaccatgcctggctaattttgtttttttgtttttttgtttttttttttagacggagtctcgctctgttgcccaggctggagtgcagtggtgtgatcttggctcactgcaagctctgcctcctgggttcacactattctcctgcctccacctcccgagtagctgggactacaggtgcccaccaccacacctggctaatttttttttttttttgtatttttagtagagatggggtttcaccatgttagccaggatggtctcgatctcctgacctcatgatccgcccgcctcggcctcccaaagtgctgggattataggcgtgagccaccacgcccagccaacttcctgaattcttgatgatttgagcatttttctctggccaccatatgccaagagccagggatctagagaggagtaaaactcaccactccctcctggcaagattcttccctggagaggtcaccagataccctccaggatttccctcgatggatcctacatcaaacccagtctttttcccccaaaccaccccttgcatctagtgagcccatcattgatccaggccccccaagccagaaacctgaagctgcctatcctcctccttcctcatgcctcattccttctcagacatcaagtgctaaggatcttcctaccaaatgttctgtgaatgttccgtgaattccaccccctcccacccccatctctgcatcttcaaggattcagacatctttgcctctcacttggccctctgtggtctccctacaagattctgacccttccctggtgcctttccacagggggtcatctccaacagcctgcagcagtgtgggtgtactctcctacggccttgcctgtgccatcccctctgcctgggccacaccaccctttcttctcacctggctggtgtcacctcatcctttaagtcttagctcctgcatcagtcctccagaggctgccgcctcccccacctcctaccccgagcctggcagagccctcatgagacctaagtagcacttggcagagctaagtaggggcaggtgtgttgttctctacataggggtctgcctttctccctggagctttttttcctacctagcacagtgcccagttagtaaatttcagccaggaaggcagatgaggaattctgtgctacacaacagagtcatgcaggaacacaaaggaagggaggaagtgacctttgagccgggccttgaggaggatttcagatgaagggacgcagccagcagtggggcctaaggttctggaatggcctagatcccagtctggctctgcattggttgataactttcaacagccctctgagcttcagtttccccatctctccaatgaagatagctagggttaactgcacataaggaccttggtatagcattagccctcaggaaatggatcctctgaggtgttgatgacctatgcaaaaaggcccagagacaggaatgtgcaggaacagtgaccagttgttgggtgcagggctgtgagccaaagatgaaactggcaatggaggtttgagcatcaggttccggagggccttcgtcattgtggttagtgacccacctggatgctcaggctgccacagcagtccctggcctggtgatcagtgtggcaagaaggttcatgccggttgtggtggcttgtgcctctaatcccagtcctttgggaggccgaggcaggaggatcacttgagcccaggagtttgagatcagcctgggcaacacagtgagaccctgtctctacaaaaaataaattacttggatgtggtggcatgtgcctgtagtcctcctaatcaggcaggtgaggtgggaggatcacttgagcccaggagtttgaggctgcggtgagctatgattgcaccactgcactccagcctgagtgacagagtgagaccctgtctctgaagaaaatagaagaaaaagtctcaactgtaactctggtgcattgactagactagaatccctgtgcctataccccacccaagagattctgactggcaagaatacactgcagtaggtcaggagcatgggctctggggtcagactgcctgcgtttatacctctgctgtaccttcaggaggctgggtgacgtggaggtggtgaggggttgtctttaacatcgccaggcctcagtgtcctcattaaaaggaataatggtagactttccttccagacttgcgtgaggattaggtgagacaaggtacataggaacccagcatctgccaccccaagactcagagcttcaccatccttctaggcagtttgggttggggcccagacatacgtgttttgttaaagttgttttttagggtttttgtgtgtgtgtgagacagagtcttgctctattacccaggctggagtgcagtggcatgactcggctcactgcaacctctgcctcccgggctcaagcaatccatctgtttcagcctcccaagtagctgggaccacaggtgcgtactaccacgcctggctaattttttgtaaagacagggtttcaccatgttgcccaggctggtctcaaacacctgagctcaagcgattctggaggtaatttttctccccctcaaaaaaaaaatttttttacatatgtatatattgggtagttaacgtgttctttttttcttttttttgagacggaatctcgctctgtcgcgcaggctggagtgcagtggcacgatctctgctcactgcaacctttgcctcccgggttcaagcaattctccagcctcagcctcccgagtagctgagactacaggcatgagccaccacaccggctattttttgtatttttagtagagacggagtttcgccatgtgggccaggctggtctcaaactcctgacctcaggtgatccacctacctcggcctcccaaagtgctgggattgcaggcatgagccaccacgcctggccagagtagttaccgtgttctcagtgatgagagtacatcagagaacaaggtagacacactcctcccaaggagctcacagtcttttggggataggcggatattgatcaggtagccaaaatatgtaattacgaactgggatgagagcaagaaggggcagtattagggacctgagagggcatagaacagagtcctgctcagtctgagggtcagggaatactttctggaaggaatgatgcttgagcagagtctgaaagacaaggagggcttaagagcttctggtctgggggccccaccgggacaggtaggggaggtccctggatgctgctcctcaacccggcccctcttgctccagacggcaactctgtaccctggtgtggtttttggcatctgcttcgtattgaattgcttcatttggggaaagcactcatcaggagcggtaagtgcctcccctacccttccagcccctccccagcaagcgaggaccagttgcactcagccctactcccaaaagccacttcctgccattcccttcccttttctgagtccccagagttacgttcccagccatgagggcagagggccagctggggtttccccagccctgcccttggtgtgtcatgccctggccctggccttcctgtgagatctttcagtcaactgacccaagcccacttctctaaagggaggtttccacagtccagcggccaactggggaatttccctttgtcttaaccaagagtgagctgcccagtgtgagtttattaggtcattatcccaaagcaagcctgtcctcctcagtgtccctgcccctcagcaccagcccctgcaggtggaggagagaggaaaggaaggatcaggttgtattacccttagagctgggaatcctgccagccccagtccagtgtgttactagcagctgtccaagactcactgaggaggattttgaactcagttgtggggagggggagtggggtcttggtcaattagcaggactgcagttgagatgtggcaggcattttgctatcctagccttagcacgtagagccctctgccctccacctgggggtggcggtaaaggtccttgcatgaggcttcacgtccaggcttacagaggaggggtttctttcccagcaacttaggaagccaccctcaagacacagtcatgcccttcctctcacttcaccttttttatccctgtgttccttctccctttgagcattttcctcccagttaccagctgctcattataaacattcactgtagaaattttggaaagtgcagagaagttaaagaagaaatttaaaataaccccaaatctgctcacccagagataaatacaatgtaggtctttaatatatgttgtcttttttcctttttatagatatacttacaaaagaattacataatttaaaatttataaaataacagcaaacatttatatgatgcttgctttgtagtaatactgttctaaacactttatatatatatttctttttatgtgattcttgtaaaaagtaagtgtagagaagaggataaagaagaaaatgaaaaatcagttctaatcccccatatcccatctaaggaagtattgttagctctttggtataggcctttccaggcacaaatataaatagatacagttgtcccttggtattcataggggattggttccaggacccctgaagataccaaaattcaaggatgctcgagtcccatatataaagtggcatagtgtttacgtacacacatcctgtatattctgactcttctctagattacttaaaatacctaatacaatgtaaatgctatgtaaatagttgttatactatattgttttttaatttgtattgttgtattttttgtttgtttgttttgagacagggtctcactctgttgctcaggctggagtgcagtgctgtggtctcagctcactgcaacctctgcctcccgggctcaagtggtcctcccacctcagccccactgagtagctgggactacaggtgtcaccaccacactcggcaattaaaaaaaaaaattgtagagatacagtctcactgtgttgcctaggctggtctcaaactcctgggctcaagtgatctgcccacctaggcctcccaaagtgctgggattacaggcgtgagccactgtacccagcttattttattgtatttttttttttcctggacattttctttttttttttttttgagacgaagtctcactctctcactctgtcacccaggctggagtggagtggcaaggtctcagttcactgcaacctccacctcccaggttcaaatgattctcctgcctcagcctcccaagtaactgggattacaggtgccccccacagtgcccggctaattttttttttgtaattttagtagagactgggttttaccatgttggccaggctgatcttgaactcctgacctcaagtgatctgcccacctcagcctcccaaactgctggtattacaggcatgagccactgctcccggccttcctgaacattttctgtttgcagttgattaaatccacagatgcagaacccatggatacagaggaccgactatgttgtgtttttattaaaatggaatccttctatacacatagtttatagcctcctttttacacttaatagtatatcatgtagttttattctgacaagattgggagcactttgtacagtgttgttttttcccttcttttcttcacataatgtgccacatgtaatctcttcattttgacctcttcatctcttcacgttctcagtccactccttcctgttcctcccctacttcctccctggatggtgagctcctctgggatgctgaggtgccttcttcactgggagtccagatcagggctggggtcagcctcaagagattctggccaggagccctgtggtgggggcagggagtgtgcttctgctgcacaagtcgcctctccttctgtggagcccagaaggtcccctcccccttgcgcagcccccatcccgggcatcagggcctcgtgggggcctcatggtgccatgtctacaggtgccctttcccaccatggtggctctgctgtgcatgtggttcgggatctccctgcccctcgtctacttgggctactacttcggcttccgaaagcagccatatgacaaccctgtgcgcaccaaccagattccccggcagatccccgagcagcggtggtacatgaaccgatttgtggggtgagtcctccagcagaggcaagagcaggggaacgtggaagagggtacgcccccctccgccaccagaagggtgcggcaaccagagttcctgccgcttcagccggctctaatagagtttatgaaagcttaacttcactccaagatcaaggtgaccaggttgtaggcagacttggtgtcatcctaggaaccaggacaaggaaggggaaggatggaagggtatagtgagacaggttaagaccatcacttggaccttgggcaagtcaccccacctctctgcaccccagttgcccatctataaaatgaggagaataatgcccaccctgcctacctctcaagagattataatagtacagaaatatgccagaagaattagcaccaccacactcgtgtaggtgctctctcttcatgccagcttgggaaggagcttggggcttcctggtggcctggtctctaacaatgtcaacctctcgttctgtggcagcatcctcatggctgggatcttgcccttcggcgccatgttcatcgagctcttcttcatcttcagtgtgagtactggtgcctcccccacccctccacccatgctagccgggtcactcccactccactcgggtgctctgctgcctactgcctgagaaagttcagatgggccacttcacctctcggagccccattcttcaccctgaaattggacaacagccttccctctcagggcagcattgaaagtgaaatgaggctgggcgcggtggctcacacctgtaatttcagcactttgggaggccgaggtgggtggatcacaaggtcaggagttcgagaccagcctgtccaatatggtgaaaccctgtctctactagaaaatacaaaaattagccgggcatggtggcacacgcctgtagtcccagctacatgggaggctgaggcaggagaatcacttgaacctgggaggtggaggttgcagtgagccaagatcgcgccactgcactccagcctgggtgacagagagagactccatctaaaaaaaaaaaaaaaaatttaaatgagatatgtggtgtgtggggagcctggtgtgtggaaagggggacttggtaaatagaagctgcctcagtgatacttcagtcattccccaccatgactaatagcatcgttgcacctggtttcatttctgggtccttgcacatctttacctctctgtgttactcacagctcctgggagggtggacagaatgattcctgcttgtcagggtcattgtgaagttggaataagtcattgtaaaaatgcttgacttcaggaaatgctgttgtaatggtgatgatgactcctcccaaagagtgccaagatgaaagttggtaggaaggcccttcagaggcatgtaagtgtggctgacccagctcggggcccagcacagatggtaccttgtaccaagtcagtaccggacatgtatctgctattccagagtagtggcccagcccctccctgctgagaccacctcacccacacaggtttgcctgggagaagggtcagaggaggtgttggctgcccatggtaccaaagcccatgtgcacttcccagggaagccccctctgtttcatctgtgtgactctgggccagtcaccagcgtctctgatccttgactttcttagctctaccaggccaagctttcatagacacacacatgtagcaattgtatatgaggcatgtggcataaggcctagcgcttggtaagctgctcaagtggtggtggctgctctataattttgatttggataagaatcattattttctacaagctgctgagttcaggctggggtctacccagagcaggtcagtcaacccctggcccctccctaaggacagtgtggctcaccccctgctctggggaagaggggccagagccacatgccaggcccacgggccctgatggtgtcatgatgatgtgtccactcctgcccttgtgacaggttggtgtgccaggggaaggggagcagggtggtcaagccagctgaagccccactgtgtgtccacaggctatctgggagaatcagttctattacctctttggcttcctgttccttgttttcatcatcctggtggtatcctgttcacaaatcagcatcgtcatggtgtacttccagctgtgtgcagaggtgaggagagcagggccaggaggcgggggagggagaactggatccagcattgaacgggttgatgaggctctgcggagaggctgggtctgggctcttcatgtggcccctgcttctggctctgagctcttgggccagtacgttgctgtgcctctcccagcctccatgtattcagctgtaccctgggcctaatgagataccttccagcttagttgtgtggggtactcaccacagctagatgaaaggacagtagatttgccagtgccaagtccactccagtagtagtttcttcaacaggctgatgcacactgggtggcctgccctccctctgggaactggccattggcagagtgggtgaagccagggtttgggatgaacagtccctctgggctgggaccctggctcctccatgagtagctctgggtcttgggcgggttgcttaacttcatgccatccgttcctcctccacatgatggggtgagtgagaggacctaacttggagggctgctctcaggattaaatgagtggattcatctatagcacttagagtggtgtttgccagccaggcacggtagctcacgcctgtaatcccagcattttgagaggctgaggcgggcagatcacaaggtcagaagatcgagaccatcctggctaacatggtgaaaccccatcgctactaaaaatacaaaaagttagccgggtgtggtggcacgtgcctgtagtcccagctacttgggaggccgaggcaggagaatcacttgaacccaggaggcggaggttgcagtgagccgagatcgcaccactgcactccatcctgggcgacagagtgagactccatctcaaaaaaaaaaaaaaaaaaaaaaaaaaaagaatagtgcctgccacatgctaagcatttgctcgagaaatgttaattatttttttgttgttgattttttttttaatgaggtataaactgtaaagttcacccttctttgtccacagttctgtggtttttagaaatgcatacagttctggaaccaccatcacagtcaagctgtgaaacatttccatcaccccatatgttactgctcttaccagagtcttcagcccctcaagcaactgtgaaattggtaggaaggggttctgccccaggacaacactgaccttcctctgtttcctcctcaggattaccgctggtggtggagaaatttcctagtctccgggggctctgcattctacgtcctggtttatgccatcttttatttcgttaacaaggtactgccctccttgaggaggtcctcttagtcctcatagggtaggaaggtcaggaggaggatgctgggagaaaaacccaagtgcctgaatcttccttttccacccagaatggggaggaccaaagccacctagaactgttcctgctctagaagatggatctttttaggaaagaaagaatctgtattctgtatgtttgggagacaaaggccatcaggatacgtgacaatgtgaataatgcttgtaaaacttacgaggtatagccatagccaaagcaggacttgaaagcaatatgtcacctgcagtgctcttcacaggaaataagagggactaataacaccttgagaaaaaggaaaagataagagtaacatgaaagaagaaaagtagaaaggagttaataaagataaaagcacaaaatgctgaaatagtctaaatagtagaacccaaatttagggctgcaggtatcctgtctctgcaggtgttctcttcttcacgcaagtactgttcaatcctgcagagtaaggagaggatgggaaagtttttcacaggcacctcggagccctcctaactctgtgaccccacataggtaaagtgtggcccaataataagagggagccaggcttacctgactagggcaactcacagagctcattgtcccgagagagagacgtgggcaagaatacagatgtccccacgacagttttactagattcattcatgatacacaaaccagatgagccattgagaggaatttggaggagccctgttgggcccctcacctccaaaactaatactcaagacttactctgacctgctgtactttgggtctccagagcccagaagcaagcagtcctctgtggcagtcaggcgtatttgcaaaatagagttgtaggtcagttgatcgaagctgggaatgccgtttcccaaaaacagtcaagttggaaaagactggaaggatcatttagtgtagtgctgtacccctacctccagtctggtgactgtgcccctcttctctaacagtctcaacagatgattctctagctcaggggtcagcaaactgcagcccgcgtgggccagcaggcctgtttctataaatttttattggaacacagccatggtcattcattaacatatctgtccatggctgctttcacactacaatggcagagttgagtagttgcgacagggaccatatggcctgcagaaactaaaatatttacaatctggccctctaagtaaaagattgcagacccctgctctactacatccagcaacagagaagacactccctcctaacattcccattctttctggacagctcctgtcattatcaaggtcttgattcacactgcagtctcccttgctgtgacttccatctttagaccttagtcttaattctgggatcatctagaacaaatctaatctccctcctctatagcccatattaatcataactctcataagtggcaagtgactaaaactctatcaaagtagcttaagcaaaaaaaaagggaaaaaaagtagcttaagcaaaaagaatgtatttgcttatataactggaaagactaagaaattggagttctagcctcaaccatgcttagatccagagtctcaaaaatatcagggctcaatcccagcacttcgggaggccgaggagggtggatcacagggtcaagagatcgagtccatcctggccaacatggtgaaaccctgtctctactgagatacaaaaaattagccgggcgtggtggtgcacgtctgtagtcccagctactcaggaggctgaggcaagggaatcgcttgaaccctggaggcagaggttgcagtgagccaagatcgtgccactgcactctagcctgggtgacagagcaagactccatctcaaaaaaaaaaaaaaaaaaaaaaaatatatatatatatatatatatatatatgtatgtatgtatgtatgtacacatacataccagggctctgtgcccacgccttagccctgtgtatctttttttggcctcagtctgcaggcaagatcttttcacaaagtagaaagatggccagtggcagccctagagtctactctttccagctttgcagccctagagctaaaagactgtctttcgtctaccatgatacgtcagccagtgaagacacgctgctctgctcgggtgacatgcccagtgctcactgttttccaggtccaatagcatcacatattcagacagactggcttaggtcttgtgctaggaatttttttttttttttttttttttgagatggagactcgctctgttgcccaggctggagtgcagtggtgcgatcttggctcgctgcagcctctgcctcccgggttccagcgattctcctgcctctgcctcctgagtagctggggttacaggtgcacaccaccacgcccggctaattttgtgtttttagcagagacagggtttctccatgttggccaggctggtcttgaactcctgacctcatgtgatccgtctgcctcagcctcccaaagtgctgggattacaggcgtgagccaccgcacctggcctattttgtgctaggattgatggccccaacaggaccaggtgttttgagtgttcctcaaaacatctggaatatggaagacaaggaacacggttaaacaaaactagagatcacatcacagcctcttgtccttcctcccttctgctccagtcttcttgctctgctcaaaaaatctcttcctccagccccaatgccttatgtataaaatgaggaactttctggctctgcctctttgcctcgtcccttgcctccttttaccacggttctgctccttgtccctcccccacccctcccccgaccaccagccacaagaatgcatataacaagagatggaggctgggtgcatatggttcacacctataatcctagcgttttcagaggtgggaggataacttaagtccaagtgtctgagaccagcctgggcaatagagcaagacaccattgctagaaaaaatattagctgggtgtggtggcacacacctatagtctgagctacttgggaggctgaggcaggaggatcccttgagcccaggagggtgaggctgtagtgagctgtgatcatgccactgtgctctagtctgggtaatagagggagaccctgtccctttaaagaaaaggggttaggggagagatgcggggctgagcctgaaaacatggccttcaccccttaggcttaggagagggcttcaaatggtgacctattttgttttctttgtttctttactgttttcttctgggctactggcattctgtgaccatgtgtctgcctgtgagtcctgggacaggccctactcaggccctgggcatatcttgataccaaggttccacattagttccctttgtaaataacacagatccccagcatctctgcccagcctctaaactctaccccagttaaaaaggagtccaaaatgctccaagatcaaaatctctgtgagatgctaacaaaagtgacaagcattctggggaagagaggaatgaatggaggctgaggcgggctgatggggctcctggtcctgaagctgggcatcctggacacccctcccctcccccacccactccgactgcttctccagccatgcgggagtgttgccatactgatctggggtctgtgggggaccaggaagggcacagctgtggccattccttttgtggcattctgggcctggcccctgaggctatgagcattagggcaatacacaggcctggtccagatgaagcagagctgtgcccatgaaccctgcctgccgcttgccacccactggagcacgccccttcccctggccaggcctcagtttccccatgatatcagtgagagtggggccccagttcgccatgcagcctggcactaagcatgcaccctgtcttctttctgctcgtggccgcagctggacatcgtggagttcatcccctctctcctctactttggctacacggccctcatggtcttgtccttctggctgctaacgggtaccatcggcttctatgcagcctacatgtttgttcgcaagatctatgctgctgtgaagatagactgattggagtggaccacggccaagcttgctccgtcctcggacaggaagccaccctgcgtgggggactgcaggcacgcaaaataaaataactcctgctcgtttggaatgtaactcctggcacagtgttcctggatcctggggctgcgtggggggcgggagggcctgtagataatcttgcgtttttcgtcatcttattccagttctgtgggggatgagtttttttgtgggttgctttttcttcagtgctaagaaagttccctccaacaggaactctctgacctgtttattcaggtgtatttctggtttggatttttttttccttctttgttttaacaaatggatccaggatggataaatccaccgagataagggttttggtcactgtctccacctcagttcctcagggctgttggccaccctatgactaactggaagaggacacgccagagcttcagtgaggtttccgagcctctccctgcccatcctcaccactgaggccacgacaaagcacagctccagctcggacagcaccctcagtgccagccagcctctgccagacctctctttccctcttctccccagcctcctccagggctgcccaaggcagggtttccagccaggcctcggggtcatcttttcaccaggagcaaacccaagtcttagttgctacaagaaaatcccctggaagtactgggggccaggttccccagacagcaggaattgcccctgttcagagcagccggagtttgctggaccacaaggaagaagagaagagacttgcagtgaactgtttttgtgccaagaaaccctggacctggggccaagtatttcccaagccaagcatccacttgtctgtgtctgggaagggatggccaaggccgctagggtccttacccctcaggatcactccccagccctttcctcaggaggtaccgctctccaaggtgtgctagcagtgggccctgcccaacttcaggcagaacagggaggcccagagattacagatcccctcctgtaagtggccaggcattctctccctgccctctctggcctctggggtcatactcacttctttagccagccccatcccctccaccccacacctgagttcttgcctcctccttttggggacacccaaaacactgcttgtgagaaggaagatggaaggtaagttctgtcgttctttccccaatccccaggaatggacaagaagccaacttagaaagaagggtctcacgtggctggcctggctcctccgtagacccctgttcttttcaacctctgcccacccgtgcatgtcatcacaaacatttgctcttaagttacaagagaccacatccacccagggattagggttcaagtagcagctgctaacccttgcaccagcccttgtgggactcccaacacaagacaaagctcaggatgctggtgatgctaggaagatgtccctcccctcactgccccacattctcccagtggctctaccagcctcacccatcaaaccagtgaatttctcaatcttgcctcacagtgactgcagcgccaagcggcatccaccaagcatcaagttggagaaaagggaacccaagcagtagagagcgatattggagtcttttgttcattcaaatcttggatttttttttttccctaagagattctctttttagggggaatgggaaacggacacctcataaagggttcaaagatcatcaatttttctgactttttaaatcattatcattattatttttaattaaaaaaatgcctgtatgcctttttttggtcggattgtaaataaatataccattgtcctactgttttgtcttgaatctcatgcaggggttggaggtctgaggtgagacaccttccccgagtgggttgagttgcacagtttcccccgaagctcattctcgtgtcacacttcagggctcaagccactgttgttccctgcctggtacaagtccattgcctagcccctccatactaaattgcagtcatttgctcttctgatcccacaagcaggaaatgacaatcaagtgtgttttggtagcagcaagatctggttttggattcccagcttcagtcttttactgtcagctcatctcactctatgaaacccagttcttcaattgtaagcaacagaaacatcggtcaaactggttttagcccaaaaatgaattgattggttcttaagtcatcaaggattttgtttattttgcttcaggtctggctggatccaggggctcaaaggatagccttagggctctttccccttttccactgtgctcctctccggcgtcactctgtcctgttatccacagtcttcctcctgatgggtgaggcagggagggcaggatgccaatcactccagacttacatgatccacttgggtatgccggggggctggggtaggggaagatgtcccttcccacttcagtttattcaatatagaggaatttcaggaaacatttctgattggcccagcttggattattatttgaacatcttgcaccaatcactatatccagggggttggagtatgatttggggccactttccctgaaggtgttggatactgtgaatttcagccctaccagaattacttagaatggttgatgaggaaagaaccatttcccatggtaagggatgcgaaacagaccaaaacagtggcctgttacccaccaccccgccaccccaaccccaagcctcagttcctcatctgcaatgggaaaggtgcttgttactatttatggagtacttcctgtgttctgatgttccaaacactttccatgggttagcccatttaatcttggatatgatacaagataacaacgtgcccctgagacagcttctgttattagcccccttttacagaggtggtcactgaggcaccaagcagttgaggtaacctgctggggcaggatggggggtgatgtcccatgatgggtggagtagtgttcacctgggacagccagacttctgaatctgtccttccaacctctctagccgcctttttaaagggctgtgtgtgtgtgtgtgtgtgtaaaattatatgtaattgatgtaaaatgaactgcagtttgataagtcttgatacacacacccatgaaattatcaccacaatctcaattgtgagcatacccaggtttcctcatgcctttctttataatcctgccctctagcctctcaacatcatgcttgtcccctccaaacctcatgtggaaatttgatccccagtgttggaggtggagcctaatgggaagtgtttgggtcatgggagcagattcctcatgaatagattagtgcactgggggaggtgggagcagaggaggtgagtgagttctctcttagctcctaagaaagctggttgttaaaaagagcctggcacctccctgcaacccccacttctctccccatgtaatctctgcacatgccagctctccaccttccaccatgagcagaaggaactcaccagaagcaaatgcccaatcttgaactttccagctgtcagaatcatgagccagactgggcacggtggctcaggcctgtaagcccaacactctgggaggctgaaacaggaggatcacttgaggccaggagaaagtcagcctgggcaacaaagcaagacctcatctctaaaaacaaattttaaaaatttgttaaaaactcgtgagctggccgggtgcggtggctcatgcctgtaatcccagcattttgggaggccgaggcgggcagattacctgaggtcaggagttcgagaccagcctgtacaacattgtaaaaccctgtctctactaaaaatacaaaaattagccaggcgtggtggcccacgcatgtaatcctagctactcaggaggctgagcccaggagatggaggttgcagtaagccaagattgtaccactgcactccagcctagccaacagagcaagactctgaaaagaaaaaaaaaaaaaaattcatgagccaagtaaacctttttttctttataaattacccagcctcaggtattccttatagcaacacaaaacagactaagacaccatccccaataagccactgatctttctttctgtcgctatagattaatttgcatctcccagagctttatataaggagaatcatacgctacatattacgctatgtatgtatacattgctaggctagaaaaataaagtttgttctaccaggaatcacaagttagaactgagtattctccaaagtggaaattacagagtgtaaggtcattccaggcaaagattattcattcagtcctcatacccaacattcacaactccctatcagaagggttaaaccaggtcaaaacagtccggcataattaggcttcatcaaacaatgccattatgttcttctaagatgcaaataaaccaaaacaggaaatactaaaatcaaaataatacttgatgctgtcatacaaattgttagttccttgctgtattcccccttctataacattaataaagggaatatcttactgcaaagaatattttattttatacatcactagccatgaatttttgccattagttattatacaaatgctgcctaatgccattagccaaatggcataaccattttatgtccaccattcacttctatagttataagtagaattttcatgatttacatatgtacatctatcagtgaggatttaacactgagatacaatctaacatctgtaatatctgatgttttaaagtagatagcaatgtaggaaagatatattttaatcacttttcatttaagtgaccttatgtaaaacattaaccaatagtttagcagttccacgtctccaagggacattttcaaatgtatgtaaagaaatggttacagatttttaagaagcatcttccatgtccacatcctgttgtaatctctgtgccattttctcttccagctgcttccctttgcctacaagaggggctcggaaagatggatgtttttcttgacttctttgatatcctgaacttctctacgtagccctttatgtttcttcagtctgttcattataaatttagcttggcatttctgtttgatctcttcaactctcttcattgcatcaatagttttattccatagctctcactgatatttgataagtgcatttctatgtttttccaattcaaatgaattatccactgtaagccctttaccagctgttttccagaatgctttggtccacctacctttgtgaggattgtgcttctttttaaagtttttatgacatttagatttacaaaatctgaacaccttgcaatcattgcggacagacatcatgccatggccagggtagatgggccccgaacagaaataacactcttgagacacatgttgaacccacgtgggtccccaccgaccaaacgccaggcttgagaggaagtcaggtgtatgtttaacctaaactgccacactcttttctaaggtggtgtatcattttatgttaccatcagcagtatacaagagtgccagttcctttacatcctaataacacttggtatggttaatatttttaattttagccattcttacaggtatataacatcttgtgattttaatttctatttccctaatgacatgttgcacatcttttcatgtgcttatttgttattgttggtgacaaatgtatcttctttggtgaagtagatgttcaaatttatgttcatttgtattgggtttggagttattgtcaagttttgagagttatttatgtattctgcagacaagtcctttatcggtaaatgctttgcaaagattttcttagtctgtgtatggcttgtgttttcattgaaaactatgtcttttgaagagcacaggttttttattttgatgaagtctaatttataaacaaataatttgtttaagcaatttaatttgttcttttttgaatttttggtttgtttgatttttgaaacaggggtttcactatgttacccaggctagtctcaaactcctggcctcaagcgatcctctggcctcagcctcctaggtagctgggattacagacacatgtcaccgtgcccagctcctttcatggattttgctttttggtgttagacatctttgcttaactcaaggtcacagtgaatttctcctgggttttctttttttcttttttgttgtggcagagtcttgctctgtgacacaggctggagcacagtggcatgatgatagctcactgcaatcatgatcaagcatcaagtgatcctcccacctcagcctcccaaatagctggaaccacaggtgtgcaccaccacgcctggcgaatttttttttttctatttttgtagagacagtgtctcaccttgttgcccgggctgatctcaaatccctgggctcaagcaatccttttgctcagcctcccaagtagctgggattataggcttgagccaaaatgcacctggctcgaatgtctctctttattttatttttatttatttatttgagacaggatctcactctgtcactcaggctggagcgcagtggcagtggcataatcacagctcactgctgccttgacctcctgggctcaaatagtcctctcccctcagcctcccaggtagctgggactataggcatgcactgccatgcccagctagttattttttgtcaagacaggtcttcctatgttgcctaggctggcctcaaacttcggggctcaagcagtcctcctgccttggcctcccaaattgctggaattacaggcatgagcctctgtgcccagctgtggagttgatatcttaacaatattaagtcttccaacccatgaacaaattatacctctcaatttaggtcatctttaatttctctcagcagtgttttgtatcttcagcatctaggtcttccacttcttttgtcagatttattcctcagtgtttcatatttttgatgctattgtaaatggtagttttttatttttattttttgagacagagttttgctcttgctgcccaggctggagtgcaatggtgtgatctcggctcactgcaacctccgcctcctgggttcaagcgattctcctgcctcagctgggattacaggcatgtgccaccacgcccggctaattttgtatttttagtagagacgtggtttctccatgttggtcaggctggtcttgaactccaacctcaggtgatctgcctgcctcggcctcccaaagtgctgggattacaggcatgagccactacgcctggtgtaaatggtatgtttttaaatttttatttatttatttagagatggagtcttgctctgtcacccagtctggggtgcagtggcgggatcttggctcactgcaacctctgcctcctgggttcaagcaattcttgtgcctcagcctcccaagcagctgggaccacaggtgcatgccaccacacccggctaatttttacatttttcagtagagattagatttctccatgttagccaggctggtctcaaactcctgacctcaagtgttctgcctgcctcaacttccaaaagtgctgggattacaggtgtgagtcgctgtgcctggcctgtaaatggtatgtttgtatttctgatttttcattgctactgttgtacagaaataacagttgatttttaaaatactgatcttataccctaaaaccttgctaacttattagttctagtagcttttttagatctcattggattttctccatagatgatcatgttgtctgtgaataaagacagttttacttctttctttccaatctggatgcctttcatttctgtttcttgcctgattgcactggctacaatatccaatacaatacctgaatggtgaaagtagacatacctgtctttattttttgggtttttttgtttgtttgtttgtttgtttgtttgtttgtttgagagagagtctctgtcgcccaggctggagtgcagtggtgtgatctcggctcactgcaagctccgcctcctgggttcaagtgattctcctgcctcagcctcccgaatagctgggattataggtgcctgccactggacttggctaatttttgtatttttagtagagacagggttttgccatgttggccatgctggtctcgaactcctgacctcaggtgatccacctgctgattcagcctcccaaagtgtgggattacaggcataagccaccacagccagcccatccctgtctttaatttgctcttttctagtgttttaaagtggaagctagggcatttatttgagggctttcttttctaatgtaggtgtttagtgctataaacttcttttaaagtctcactgtaatggcatcccagaaattctgctatattgtgttttcattgtcattccattcaaaatactttctaattttcatttgatttctttttttgagtcatgtgttatttagaagtgtgttatttagttcccaaatattgggggatttttttcaaggatccttaggttacttatgtctaatttctaattctattgtggacagagactttgtatgacttgggtccttttgactttattaagacttgttttatggctcaaaatatggtctatcttgataaaggttcacgcacaattgaaaagaatggtattctgtgttcttgggtacagggttctataaatatcagtcaggtcaagttgattgataatggtgttcaagtatatgatatctttactgattttctgcctgcttattctatcaatgattgagaaaggggtactaaaatctctggcggtaattatagatttttatatttctctttgcagttctattttttgctataggtattttgttaggtacatactatcttttggattaatttatccctagtaatttatgtaatttatctattttgtcacatattgatatagccaatcccacttgcttcttactgttagtgtggtatatcttttccatccttttacttttaacctatttccatttgtatagttaaaatgtgtttcttataggcagcatatagtttggtctttctttcttttttccaatcatacaatctctgctttttaattggtatgtttagaccacttaatttttttttttttttttgagacagagtctcactgttgcccaggctggagtgcagtgttgcaatctcagttcactgcaacccctgcctcccgggttcaagtgattctcctgcctcagcctccgtaatagctgggactacaggcacgtgccaccacacctggctaatttttgtatttttagtagaggtgtggtttcaccatgttgaccaggctggtctcgaactcctgacctcaggtgatccgtccacctcagcctcccaaagtgctgggattacaggcgtgagccaccgcacccggcctccagtgtatttttcatctcagacattgtctttttttttaatgtctacgtatttcatttggatcttttttcatattgttcatgtctctattttattatggtaaaatacacaacataaaattaactgttttaatatttgtaagtatacaattcagtggcatcaggtacagtctcaatgttgtgcaaccatcaccactatctatctacagaatattttcatcatctcaaattgaaactgggctgggcgtggtggctcacacctgtaatcccagcacttcaggaggccaaggcaggcaggtcagctgaggtcaggggtttgagaccagcctggcaaacatggtgaaaccccatctctactaaaaatacaaaaattagctgggtgttgtggcacgtgcctataatcccagctcctcgggaggctgaggcaggagaattgcttgaacccctgggaggtggaggttgcaagtgagccgagatcacaccactgcactccagcctgggcaacaaagcaagactgtcttaaaaaaaaaaaaaaaaaagccctctccccctccccctccccctccccctccccctccccctccctctccctctccccacggtctccctctcatgcggagccgaagctggactgtactgctgccatctcggctcactgcaacctccctgcctgattctcctgcctcagcctgccgagtgcctgcgattgcaggcacgcgccgccacgcctgactggttttggtggagacggggtttcgctgtgttggccgggccggtctccagcccctaaccgcgagtgatccgccagccttggcctcccgaggtgccgggattgcagacggagtctcgttcactcagtgctcaatggtgcccaggctggagtgcagtggcgtgatctcggctcactacaacctacacctcccagccgcctgccttggcctcccaaagtgccgagattgcagcctctgcccggccgccaccccgtctgggaagtgaggagtgtctctgcctggccgcccatcgtctgggatgtgaggagcccctctgcctggctgcccagtctggaaagtgaggagcgtctgcgcccggccgccatcccatctaggaagtgaggagcgcctcttcccagccgccatcacatctaggaagtgaggagcgtctctgcccggctgcccatcgtctgagatgtggggagcgcctctgccccgccgccccatctgggttgtgaggagcgcctctgcccggccgagaccccatctgggaggtgaggagcatctctgcccggccgccctgtctgagaagtgaggagaccctctgcctggcaaccaccccgtatgagaagtgaggagcccctccgcccggcagctgccccgtctgagaagtgaggagcctctccgcccggcagccaccccatctgggaagtgaggagcgtctccgcccggcagccgccccatccgggagggaggtgggggggccagccccccgcccggccagccgtgccgtccgggagggaggtgggggggtcagccccctgcccggccagccgccccgtccgggaggtgaggggcgcctctgcccggccgcccctactgggaagtgaggaacccctcagcctggccagccaccccgtccgggagggagatgggggggtcagcccccccacccggccagccgccccgtccgggagggaggtgggggggtcagccctccgcccggccagccgccccgtctgggaggtgaggggcacctctgcccggccgcccctactgggaagtgaggagcccctctgcccggccagccgccgggtctgggagggaggtgggggggtcagccccccgcccggccagccgccctgtccgggagggaggtgggggggtcagccctccgcccggccagccgccccgtctgggaggtgaggggcgcctctgcccggccgcccctactgggaagtgaggagcccctctgcccggccagccgcccggtccgggagggaggtgggggggtcagccccccgcccggccagccgccccgtccgggagggaggtgggggggtcagccctccgcccggccagccgccccgtctgggaggtgaggggtgcctctgcccggccgcccctactgggaagtgaggagcccctctgcccggccagccgcccggtccgggagggaggtgggggggtcagccccccgcccggccagccgccccgtccgggagggaggtgggggggtcagccccctgcccggccagccgccccgtccgggaggtgaggggcgcctctgcccggccgcccctactgggaagtgaggagcccctctgcccggccagccgcccggtccgggagggaggtgggggggtcagccccccgcccggccagccgccccgtccgggagggaggtgggggggtcagccctccgcccggccagccgccccgtctgggaggtgaggggcgcctctgcccggccgcccctactgggaagtgaggagcccctctgcccggccagccgccgggtctgggagggaggtgggggggtcagccccccgcccggccagccgccccgtccgggaggtgaggggcgcctctgcccggccgcccctactgggaagtgaggagcccctctgcccggccaccaccccgtctgggaggtgtgcccaacagctcattgagaacgggccaggatgacaatggcggctttgtggaatagaaaggcgggaaaggtggggaaaagattgagaaatcggatggttgccgtgtctgtgtagaaagaagtagacatgggagacttttcattttgttctgcactaagaaaaattcttctgccttggggaaaaaaaaaaaaacaaaacaaaacaaacaaaaaaaaagtgaaactgtatactcattacacattaactctccattctccgctcccccaacccctggtaaccaccattctactttttgtctctgaatttcactactctaagtgcctcatataagtggaatcctacaatatttgccctttttgcctgccttattatacttaacataacgtcttccaggttgacccatgttgtagctgtgtcagaatctcactccagccaggcatggtggctcacacctgtaatcccagcattctggaggccaaggcagctggatcacctgaggtcaggggttcgaaaccagcctggccaacgtggcggagaccacccggtctcaaccaaaaatacaaaaattagccaggtgtggtggcatgtgcctgtaatcccagctactcgggaggctgaggcacaagaatcacttgaacccaggaagcagaggttgcagtgagccaagatcgagccactgcactccagcctggccgacagaggacagagcaagactccatctcaattaaaaaaaaaaaaacaaactccttttgtaaggctatattatagtctgtcatattttgtttattcatccatcaatggacatttgggttgctttcacctttttgctattgtgaataatgctgcactggtataaaaatatctatttcagcccctgatttcagttcttctgggtacatacccaggtgtagaattgttgaatcatatggtgattctttaattttttgaggaactgccatattgttttctacagtggctgtgccattttatactcccatcagcaatgcacaaagactccgatttctccaaggccttgccaatacttattttctgttttgttttttttaataatacctatcctagtgtagatgaagtggtatctcactgtgattttgatttgcatttatctacttattagtgatgttgagcatcttttcgtatgcttattgactgtttgtatatcttctttgaataaatgtctaatcaagttcttttaatcaagttgttttcttgttgcactatagaagctatttgtatactgtgtatattaaacccatatcaggtatctgatttgcaaatattttctcccattttgtgggttgcctttttactctcttgatagtgtcctattttgaacaaaagtttaattaatgtatttagagacagagtcttgctatgttgcccagactggagtacagtggctgttcacagatgcagtgattgcacactgcagcctcaaactcccgagctcaagcgaacctcccacttcagcctcccaagtagttgaaactatagacatgggccaccaagcctagccaaaagtttaattttgatgaattccaatttatctatttttttcttctgttgcctgtgctgttggtgtcatatccaaaagatcatcaccaaacccactgttatgaaacttttctcctatgtcttctaagaatattatagttttagcccttacacttaggtctttgatccattttgagttcatgtttgtatgtggtatgtggtccaaattcattcttttgcatgtggatattcagttctcccaacaccatttgttaaaaagactgtcctttttccattgaatggttttggcactcctgtcaaaaatcttttaaccatatatatgagggtctatttaatttgttgaacatgtggaataaaattagagtaacttgtacttacctgcccgttttaacatcggtttcagttgtgggttatgcttgcttatttccctcattatggattgcattgcctgctactttgtagaactgatactctttgattgggtgccagacattgtgagtttcaccttgttgggtgctggatatatttgtaatctgtaaatcctcttgagctttcttctgggacatttgagttacttggaaacggtttaatccttttgggtcttgctcacacaagattttttttaggcaaatccaaccagtgctcattcaaaagctaattatttgcccttagtgaggcaaggcctccctgagtcctctcaacaccccatgacactcagcatggctggtgggaacagacacagtccccacccagtgagcagcgggcactgttccctaaatccttcctgatgggcctttccttggcctggggtccttccctctcacacatgtgctcatcagtatccttctgggtttcagggatgcctccacagctctccaggggtctctctctaggcagctgtctcctctctggcactctgtcctacacacttctgtcctacacactttggttaccttgccctgacatttagtgccatctcctcaactcatggtgttccctggctccactttaattccccctccctgtgttgcagcctgaaaactctctcaaggctgggggcaatcacagggctcacctttgtttcccatctgtctggaatctctgtcctttattgttcaacgcccagagccttgaaaaccactatttcatgtattttgtctagttttacttttgtttcaggcggacgaatatatctgatctctgttactccaccttgcctagaaacagaagtctctgcactgctttttttatttttatttttagagacagagtttcactcttgttgcccaggctggagtgcaatggcatcatctcagctcactgcaacctccaccttctgggttcaagcgattctcctgcttcagcctcacaagtagctgggattacaggcgcctgccaccacgcccagctaatttttttttgtatttttagtaaagacagggtttcgccaagttggccaggctggtctcaaactcctgacttcaggtgatcctcccaccttggcctcccaaagtgctgggattacaggtgtggccactgcgcccggtctgcaccgcctttttttacctgtaagatcacagggcctctgcgaagcactgtatgagtgattttttgttttgttttgttttgagacagggtcttgctctgttgcccaggtcagagtgcagtggcacaatctcagctcacttcaacctccacctcccaggttcaagcaatcttcccacctcagcctccgaatagctgggactacaggcgcccacaaccacactcagctaattttttttttttttttttttgagatggagtctcactctgtcgcccaggctggagtgcagaggcgcgatctcggctcactgcaagctccgcttcccaggttcacgccattctcctgcctcagcctcctgagtagctgggactacagacgcccgccaccatgcccagctaatttttttttttttttttgtattttcagtagagacggggtttcaccatgttagccaggatggtctcgatctcctgaccttgtaatccgcccgcctcggcctcccaaagtgctgggattacaggcgtgagccaccacacctggccccactcagctaatttttatatgttttttgtagagacagggtttcacaatgttgcccaggctggtctcgaactcctagactcaagtgatgtgcccaccttggcctcccaaagtgctgggattacaggtgtgagccaccacacccagccaagttctttgaagtgaaagagacactcacacaattgatgctcaatctctcctcactcaccaaaggagagtctaaagggcctgcctcctaggaatcttagtttggcagtgacttggctcaacttaaggaactttctaggtccagaacccttgcaactggacctgtgctagcctagaagtcagcaccctctaaccctgagggccatcatggggtgaaagtgccagctgtgaggtctcacagaaaagccaaagtgtgactgtgagcgcctagaggcagtggtcttagcttgcctctaggcactggacattatgagcagacatccattccgcgtcaatgcttggtctaccactaccctgctcccccttgccaataactaattcaagactgggcatgtgacccagttctagtcagtaaggtataggaccaggaaaatctacagtggcttctgggaaaggcttcctccattttaagaggagccatggtaagacatagtctcccctctctggaattgccatattccagtgtggacacttggggctgctgccaccatcttggcaccaacctgaggatggaactaacaagaaggatggcagatcagagaaggcccgagcctggacgcatcattgaggtgatggatcaaatagccccactgcctcaattcccctctgaatattcatataaggaaaaaagacttagtggttcagttagatgccaccaaaagcaaaagcattgtcactgagccagccacctggagggctggaggtgcatggaggggagcaccttaaaggtacttttacctcctgctaaggagttttgactttctcctttggatgagaaaagggccaatagctgtgaaaagacatgcctaaggccatgtagggggaagtggcaagagcagccctgcacaggcctatcagccttccagcgggtgcctgatgcactacagccctgtgccccaggatcctgagtcagctttgatggtggggcctgtgggtggaggcctcaaagttcaccgactccagtcaacgtttagttctcctgctgagcaagagcaagcaagcactggggacttccttgaatttttgtgctgaaatggtatccttggaggaaaatatcaaagtcccccgagctgtaatcaaggcagttgcagattacaagtaattgccatagtttcgggacaggtttttcttggatttaaaagagcctgtccaaagttccttcccgggccaacagaacagaacagggcaggcacctgagacagaggggagcagaaccctgggatccaaggcttgtgtttgctctccacgccagagcaggaagccccctctgtaccctggcctccttcctccacgcttggagcatgtgtaggccacgtggccatgtctctgtagtaggagtcgggaatgggctccgggacatttattgcctcaattccaagactgcctggaaaagggcggtactgccttgggcagtagagagttcctatcgctagagatacaaaccccagaagggccttcagcaggcatctgatgccttcatacatgctgtcgcctcgcccaccaggaagaccctcctgaacctcaaagatgtgacacatgcattcattcatttcacaaagaactacttgtgccaggtgctgctctaggtaagggggatttagcaatgaataaaacaaagtgcctctgggtgtggcggctcacgcctgtaatcccagcactttggccaaggttggcagatcacctgaggtcaggagttcgagaccagcctggccaacatggggaaaccccatctctactaaaaatacgaaaattagccaggtatggtggtgcatgcctgtaatcccagctacacaggaggccgaggcacaagaattgcttgaacccaggaggagggggttgcagtgagctgagattatgccactgcactccaacctgggtgacagatccagactccgtctcaaaaaaaaaaaaaaaaaaattcccgaagagtgtagagaaaaaaaacagataaaatgaatatacaatgtgatatcaggtggttgttaagtgctataacagaaaggggacagagagtgacagggtgagttttagaaagggtggtcggggaaggcttccctggaagaggtgtaactaatgtttgaactgataaactttaatgaaggcaggagccggccatgcaaacatctggagaagcagcgtctaggcagagggaagaggaagcaaggtcttcagccaggtttgaagactagcaagaggctggtgtagactgggcatggtggctcacacctgaaatcctagcactttgggaggccaaggtgggcaaattgcctgagcccaggagttcaagaccaacctggacaacatggtgaaaccccatctctacaaaaaatacaaaaattggttgggcatggtggcacacacctgtagttccagctactcaggaggctgaggtgggaggatcacctgagccctgggaggttgaggctgcagtgaaccttgatcgtgccactgcactccagcttgggcaacagagtgagactccatctcaaaaaaaaaaatggctgctggagctcgaaagtggtctggcggcggagaagcataggagatgaagttggattggtgactggaagtcagatcaggagggtcttgcaggccaggcagagcatgttggcttttcctctgtatattgcagccattgggtttggagcagaagggcatggtctgactcaggcttagacagccacactctgcctgctgcacccatataaagccctggcacatggtaggtggttaataaactttggtgattattatcaatgttcttcagctgcaccattggaccccggagctcactgagggcagggaccagaatggtcatccatgcctattatagctggtgctaagatgtgtggatatatcagtgactcagggcatgaatgagtgagcaagcttggagtgggttctgaggaggagactcatgcccccagggcaggtgggacatgccgttggtgccatgtaaaggaagcaagccactggctatgccacagagagaacaggtaggcaggtaagtgcccattttagaaaagaaccattgcctgggccctaggggaatgcaggatgcagctgggcccaagtatggctgcaggagccaacgcagcctgcaaaccagcaggcaagagtcaggcaaaccacatggggcaccacctcctagaatcaccaggatgcttacaggctcaccctgatccccccgggaacattagaggcagtcatctggcacaaaacagcacccagagggtgcagcctagacaggcactggtgcccagattctggttttaggctgtacatgggaggtggcagacactgttgtgggctggggaaatcatggagggcttcctagaagagctatagcctagatggacagataaggttcaaactgaagacactaggggtctataactgcagacactcctccagacatgccctgtgagatcactccacctctgaaccatgcctgatacccctcctcactatccacaggataatgccttggcttggcattcaagagttcctatcttcagaaagtggcctcttcaggtattgctcttgaaaaaaaaaataataaaagataagtaaaagaaaaaagtggcctcaatctacccattcagctttgcctctcccaagcagccaaacccacagcacatgctatacgttaaccacgccgcacattttcccatccagtgccttcgctcatgttgttcgctctgccaggaattcccttctctggctccactttccaaactactgcctattctttaacacccagctcgtgacccaacttcagagaagtctccgccctctggtcccacatcatcacatacctggtgaactataagccacgttgaacacagttgggttttgtctccttggatgaccgttggataccagttacacctcttgccccggtgtaattattagtcgtgaccctttcattcccagatatgttccagctggatggcaaattaaacagtcacccttcatcacccacaccgttctccacccaactcaaatcctttgggcaggaactatgcctttgtcagagcccagcacagtactctgtatgctggaataaagtcagtcactcataccagtaatctttgagacactggacactaaactatggggaagcaaagcagcagaaacatgtgtccctgttctcctgccacatgtgaaaggaggtggaagaaggtaagaaaagatcatttcagagaggccacgtgcagtggctcacgcctgtaataccagcactttgggaggtggaggcaggtggatcacttgaggtcaggagtttgagaccagcctggccaacgtggtgaaaccctgtttctactaaaaatacaaaaattagctgggtgtggtggcgggcacctgcagtcccagctactagggaggctaaggcaggagaatcgcttgaacccgggaggcggaggctgcagtgagccaagatagcaccactgcactccagcctgggtgacagagtgagaccctgtctcaaaaacgaaaaaaaaaaatcatttcagagagttacaagtgacatggaaaaaatcatgaagggaggggtagaggctaattttggacaggctgggcagggaaggcctctgaagtggcgtttgaggactgaatgaattgagggagccatgagatgagaatatctgcaggaggaaaatcctagctaggagagggaaaaaagcaagtgctaaaatcctgaggctggaacatgcttagtgtgtttaaagaacaggagagaggccagtgttgggggcacagagagagcaaagcagaagtggatgggagatgttgggagggaccagcaaatgcagggctttgtcgcctgcaataaggaattttatatatatatatatataaattttttttttgagacggagtcttactctgtcacccaggctggagcgcaatggcgaatggcatggtctcagcttactgcaacctccgcctcccaggttcaagcgattctcctgcctcagcctcctgagtagctgggactacaggcacccgccaccatatccagcacatttttgtatttttagtagggatggggtttcactactggtgaaatcctactggctggtctcgaaatcctgacctcgtgatccacccgcctcagcctcccaaagtgctgggattacaggcgtgagccaccatgcccggcctatagatacatatttttaaccagtgtagggttttggatggggaagtgacatgatctaagttattttttccccagacaggcaattttttattttttatcatgcgtatagaaaacaaaagtgtcacagatccccttgtgactggacaaagccacctcaggaatatttctctgcttaaaagaagcattgtcagttacagtgatgtcaattacaacctggcacaaaatcatcaagaccatcagggtcacagaattctttctggaggttatccttgcagaacacaggcacagcttccagtctgaagtccaacaaaaccagaactctgcttctaagtacaagattatggtaaaggccccaacaacctgataacaattgtgaatagtcacataagtttccaagtggcataaaaaatgtacactgacaatcttgcaaaagttctcaactaaaagcaacaagcaagcctttacagcataatgccccagtgggctgaaacacaggaggggatgcatagggtcttacttaaaagcagcagaagaaaagcttacattaactttctacatacacaaggtaggaccaagagagaaaacctctaaagttgcagtgttctgttattcttctagtttacaaaacatattggcgaatcaaaaatgttagcaagggctgggcgcggtggctcacacttgtaatcccagcactttgggaggccaaggtgggaggatcccttgagcccaggagttaagaccatcctgggcaacatagcgagacccccgtctctacaaaaatgttttttaaaaagctgggcatggtggcatacacctgtagtcccagctacttgggaggctgagatgggagaattacttgagcccaggagtttgaggctatgatgcatcactgcactccagcctgggcaacagagtgagaccctgtcttgaagaaaaaaaaaaaatcagatgggcacagtggctcacacctataattttagcactttgggaggccaaggtgggcagatcgcttgagcccaggagttcaagaccagcctgggcaacatagtgagaccctgtctctatgtattaaccaaaatcaagggctctcctccttctaccatctctcagccatcctgccttttcagctggctctggttccttttgtacttccctgccaaaagcaccctccacattattttgtgataaggcctccccaggtcctagggaacagaagataaggccttccatgggaaggggcctgggtatggccactaccaccccttcccctaaaatgaaatggagacagacagctctgcaagcagggggaggagggggtgggcagctcagctcttatacctagaggggttcggacttggtggaagggtaagaaagagttggggttagtctaaaagaacacagcataaaatggaatattaactatccccgctctggggacttcctggtctctctgttcagcagccttggactgtcccctttggaagattctaggccttgctaaagagggtaaggtataggggaagagagaatgctggcagtctacagggcaaaccctccctctctggagacgaagagaggcaaactgaacacgaaagtctttcttgttgagtttaagaaaaaatctttttcttcagttgttattttttgtttctaagccatcatttaaagaaaaaaatggtgtgagatctgggtatggatagacaggccccaggaccaggaagaccccctccccagcacccacagcttggcagcctaacaggtagaggcaggggggctggcagagcacctggattctgtggggtccagtaactggggctcaggaggggatcccatccttgcccctgcctcactcacatgcccagataggccagtttggcagagttcctggggattaggggctctcctgtgcattggcaggtggcccacctgggtccacaagcggctatggaggttcctgtagacctgggggcgggcaacagggctgatggtggtctgggcaaaactcatgggaaaggagatggctaggcattggtggggcacggcacagaccctcataagctagcagcaggctgtgatgtcaggccaccgtggggcaggaggagcagtatgatcacaaagaatgtgctgtccactgcttcatgcccttgacctcacccatgcccagcagccagctgtgtgctcatcctgccagatacccaagagtccacttggtggtagcctgtggtcttgaggccatggaatgtccaagcctgggtggcacccggcaccaaatgaagccacttcatcttgggtgatgagactcagtttgccacagccagggtgtagagagctactgtgagcacgaccagcaagcatgcgaaggccggcaggctggagtcttgaagcataggcctcaaagaggcactgtcctccaagtagtgacttgtgggtacccttgtcaaaaatggctgggatggccacggtcacaggtccatgccgtaaagattatggcagtgcacatccacagcactgggtgcttagtgtagacgcagcggcatgtgacagccacgtgatgttaacacagaacagcaagaggccatatggaaacagtagagactggccacgagggccacaatttgagagctgagtccaccgaaccacgcagagcgggagtgcacagaacagacagcagacagcagacagcagacagcagacaacagagcgcccaccatgggcctgagcccagatccgccacccgtaggaggcatgaggaagcttatgtaggccgcacatcccaaggcagcacttagccagactggaacccgtagggcctagaaggggtctccgtgggccaccttgcgaggcctcccctggctctgcagggcctatcccccagcaggtagtactgcagggggttgggccacaggtcatctttaataatctgggcaaccctgtcggcctctgggaggctgtgctgtgaaaaccagctgaagaagcttcggacagtgtcccggttcctgtgtacgagggccgggggttcctggccccagtgccatcggatgcgagtcgcaatagacaccactcggcctgaggctctgcattcatactccttcactatcaccttgttctggaagtaggggttgctccaaaagcggaacttgaatttgcaacctgtcctagagtgcctgagctccctcacctccaaattcatcaggtagcagagcatgtcttcatctcgagggctgatcatggctgagagctgcgggtggttcaggaaggcggtgacccagaagcccggaatattctggatgatgaagctcctacgggcgaggtacaacctgtgcatccgcccaaacctgcgctcgagcgggaggtaggccctgtcggcctgggcgctcacggcctccgcctcccactggatggcctccagtgggtccacaattagggcaccaaggttcaggagccgcgggccctcctgggcctccgctgccacctcctgcttctcctccccctcctgctgcttctccacctcctccgctggctccttcttgaagatggcgccctcctccttgttcgcgtcctcggccttctcgctggctcctgcccgagtccctagcccctctgcaccacaggtttctggggcttcgtcccggacccggccattttccaggctcggagtagtcgccgtggaggccgcttccccgcgcccaggggaagggaaggcggtcccggggcccgctgcggggtggagggacccgcgccccccagcttctcgggcccgggccgcggggaccgtgcgcgcgtccccctcccgggcaaggccgggcggcgggcgcgccgcggcttctggggtccccgccctcttgtccgccatcgcctgcgggagcctctggcctggaggggctcggggcgcgctggcgactgcgggctcggcgacaggggcggctggtggcgggaggacagtgggaggaaggctccgccccacgcgcccccctctcggatgtgattcgccggggtctcccgcagccggggcgagcggcttggaagcccggaggaggggtacggaactgcccgatggggatgcgaccgcgggcgccagacgaactgtccccacattcgttggcgctggcggtggaggtggggagaagtgtgtaccaagcaagagtcagctcggagcaaacaccaggggacaggcccagtcgctggtcctggacaagtaaaactttcccatcacaaccaccacgccaggcgattgctcagtgttccccatctgcggtgggcaggcaggagtcgcccggcttccacactcgagtggcgctttggggcagttgtaggacactctcggccttacaggggataaattactcaggcacatgcagagggcttaagaggtatctcctgcaaagactgaccagactgaaactgggagcggcagataatggtaattttctgacacacaaaggtgatcaacacgttcatgtagggaaagcaggtgcttgaaatattcatgtggggaaaataagcaaggtcagagtggaaggatctggggtgagagagggtcttaaatgctacaaaccagggagcgagtgggcatctgcctggtttccccaacaggagttggttcctcctgggctggttggcagaagcgaggtggaccttgcttcactttgtgctaggcccaaaggctacccttccaaaggtggactctagcttgaagtgcaggaactgtacctggcaggctaagagctggattggccagccctcttagtcctcgatcctgcaaatctgtgttcctgtggtctcagctcccaaactgtggcctatggaggtcagtacctccaatccccctccacctctgcgtggaagtccttgccacctcttccagaaagctttcagccttttcctgacaaatggatacaacagctccctcatctgagccctcagacctatactgtggtatacactccctagggagcaaggtggatttccttagggtcctagctagggttttaacctactggggtggacagtgaacatttgtcaagtggaaggtcaaaaatgaagggtcagcccacttcctttgtacataaaacacctgcacttgttaacggccccataggctcttggctggactgcaagtgacttgcactgcttggccatagacactggctccagaccacagaaaagccagttcagtctgagcccctgatgggaggatctcagcacaagggctggcacccaggatggtggtaacgaccttcattagagaccaccaaagtcaggtgaagctatgtaagcctctcagcagtctgcctgaacccggtggttgggcacaagtataggtaaggtcaggtcctagctgtcaccagctgtacaccttgggcagtgactagggtgaacatttgtcctttcttggacaaccagcatcaattcttcatcttaagagtgccccaaatttcctttgagaaaccactcctgtttcagtcttgttgtcactggcatatggtaactggtttggggatggcacagaatcccatcaaggccaatgaaacaggatgcttattggggcttctgtggtgagtcctctcctgagagcccagaaagggttgcttccttctggctggcaatgtgtgagaatggcaggtctggaatccaggcagcattctgctcactcccacacaaaggggaaatctactttgtagggcctgtggatgaagtcacaactacacaagacagagcagagagaaataggaatgctgaggccagccatgttggagccactggatcaagcctaacccaaagactgctctacatctggcattttccagttacatgcaatttcagtgtttaaagccagtttgattttggctgtctgactcttgcatccaagatgattaactgatagaattatgccacttacctcaaagacatgcaaatatgatatttaacttaaaagtacaaagcttataggtgctgatgggaggggtttttactgtctgccctacgctcaccatcatcctggatgctaaagatgtctggagactccaattcttcccaattcgaggctctctccaaccgtttcccaatcagacaggttcacaactcccaaacacatcattcagaagtttttaataaacaacttcattataaaaacctttttttgaaaatgtaattctgtaaaacattgaaaaatctactttaacaaagatatgccctgtgcattttctaatggcacttatactttacaattaaaaaccttgttttatataaagccaaaaatactccaagaggttattcactgtgtttacaaagtgctagaagatttctgtcttgtacttttctctttaaataatctggagttacaaaagagtggctccaaagccttgaccgctggtagggagggagaagcatgagaagtggtgtctcaggagttctagtgccaaaggtggagaggtgcaagtgggaacaatcagctaaggaagtcagctgacacacaaagaaatcggactggaatttttccaaacccctctatggaggcactaggttatcatggtgaacacccttttccctcgccatagaccctactctccagaggtgaaggtcatggccaattccttccacagcaggttcagagttccaggagaggccagggtgggatcccagaggaatctggacttttctggccaacacctgcctaaggcaaagtttcttattacataaatatccttgttaaaaagcaaaatattgatcctgtacaatataacctgttaaaaaaatcgtgcttacaaacagctcctagataagagggcaggtggagagaggacggagaaaacagctaccaaaaagggaggggggagtttaaaggactactagggaaagttttagggcagtgggagaattccaacttaggacaatatctacgagcaaaaaagtaatcacacctgcttcccggattttcaattaagaaaatgccatttgtaaaaggttgggcggtgggctggagggcgggggttgcagggaacctcattggcgctcctttccctgcctcccacctcaagatgatgcagagatcctttgagctgacacctgggcatgtcatccccttacccccaggactgtactcagccctgaccagctactgtgtagggtgggagggggacagctcattgctggcagaggctggaggtggcagggaaaggggacatcactttttttcctggtccctcattggtctttgtcatatgccatggctcctgtcctgggcagatgcccctcaggttctcatggcctcagtaagcatactgaagtgagttcgggtactgagtgcaggataaagctattcttatcctttgaacaaccaggccactaaggctttttttttctttccccccgaccccccagattttaggaagggaggtttaagaaatgactggctagctatggtccaaaaaaaaaaaggtgaaggcagatattattcctctgtaccagcaaagttcacagtgataggaaaattccttgtgggtgctgaggacactgagaggaggaaaggaaagacaggatagatgggaggacacaggagtggggaaggcaaggagaaaagacaggaggtgggggcaaggccccggttacaaagggtttaaacagttgctttgccagtcctatgacttttccagcatcacttacggggagagagaattcgagggagggacaggaaagggcaggcagagaggaaaggactcctctaacagcccgggactttgtattctgcagccagaggcccagtggcctctgtaaactgagagtgtagggaaggtggcagttaaggtgagaagggttgctgagtctagtgatgaaaaccagatacaacaaagaggatggcaacagcgagtcccaactggattctcacataccatcacctataatacaagtcccaataacatgcacagcatgcaggaggtggctgcgtaccaaggtagacactttttaaaataaaccttaattagtccctgggactcactgaaactaatttttagaagcaaatcatctagtctgattctaaccttgccagacattttaatatctggtgtttttaaaaaggtatcccaagctaccctgcctaaatcaaaacacacttactccaaattgcttctaatcaagagctagggagctaaattttaaggcttttacctcaaacaaggagtactggcttaggctgaagcagaaagctgagtcctggacctgctcagttcctgatgacaaaccaagtgaacctagacagaaggtgggtgagggaggactggtaggaggctgaggcaattccttggtagtttgtcctgaaaccctactggagaagtcagcatgaggcacctactgagagaagtgcccagaaactgctgactgcatctgttaagagttaacagtaaagaggtagaagtgtgtttctgaatcagagtggaagcgtctcaagggtcccacagtggaggtccctgagctacctcccttccgtgagtgggaagagtgaagcccatgaagaactgagatgaagcaaggatggggttcctgggctccaggcaagggctgtgctctctgcagcagggagccccacgagtcagaagaaaagaactaatcatttgttgcaagaaaccttgccggatactagcggaaaactggaggcgggggtgggggcacaggaaagtggaagtgatttgatggagagcagagaagcctatgcacagtggccgagtccactgtaaagtggaagagacagaagggacattgtggataaggaaaattttggtttgggacacaacaatgtacccatagattaggacttagctatctacccattcctaaccttctgcaaactcttcttccaacaattccacaacttcccggaaaagggacaggtgggaggaagaccaatgaggggctcagacttcctcctttgctatccacaccaacccagactctgcttccaagactaataacaacagctcatgatgttcaaggtggggactaggggatggggaggtgacggacgtgggcatgcctttcatttcttcccctctccagttcaagagaaggatgagggggtcataatgtacttggagaaaaacagaattgcagacctgtgagaaaactgctccaatcctcttgcctgtcttctgtggataccgccgaggcaggcaggaacaaatgcagtcatggaagatggcagagactgaagcagtccaaagtcagtttatttccccacgggggaaaaatgtgacctcaaatgaagagaagtcagcaagccccgactccaccttgtaaacaggactccagttaacaccaggtaccaaatggttcaggctggtgccaactggaatggactgatgggaatggattcacggtgtgtaaacagtgttcactgcaatcactctaaggctaacagcttggcaagggaggtgaaatggtgtgtctgaggtgactgtgtaaacggtaccgttgctggacaacactgactgaaaacggaggtgctggtacaggaggaatgggtgggcgagaaataaaggccttctctcctgcccattggttggaagcaggcaatggagccaagtgaccttctacagcagggcctgaccaactgactgctgtggggtctgcaggttgggaccagaaggtgggcttcttgggcaatttctctagaggtcatccaaggtgaaaccctctgtgtctccaagaggcctccccattctccaaagagaaggaggttctggcgctttggagaggaagagggccaagtgtggctcccgattcaggtcaaaaaaataaaagtaaataatacctgaagtcctacggtatgagatcttttcacggggttggggctcaaggctccttctggaatcgatcctagagcctgaacccccaaaccaagtgctcctgtatacagacactggaatttttttttttgaacccagctctgaaagctcagctgccttcatgggggacacagacggggtgggtactaaggctccataacagagccaaaaactgagctgagggcctctgtgggggctactggaatgcttgatggaaacgaggcagggtggtgctactcaggccagacgtgaagacaggaggcaaggagtgcagaggcccaaagttcagtggtcccccagctcctggggaatcttgaggctgagcttgcaaagtggtaagcaggggctgtgcctcagcctgggagtagcccatgaccaggcctcctgtggccccaggtgggttacacgggggcaggttgagtggaagaaagcccagtaggtgggagaagtccacattagcagcgcagagggcctcagagaggttggcggggctcttggcaagcagtgcttcatctaggagggccgcagctgccgccggctgaggtgaggcgggctggggttcagcggatgagagagacaggcttccaggaagctccgccagaaaactatccacctccactttgggcaatttgtcgggcaagtatgaggtagatccaagctggtattttggagggagctgagctggggaagagataggtgaggattccagagggtagctcatacccatgggcagcgtgttgtgcaccagggagtgtggcacgcccgtgctgggcatggtagggatgtgggcaccatacatgcccatgggcaacatgccagggaaggccttggtccccattacgtcccgagaggccatgcacagcacagggctcagctcttccttcacactgactgtggagctgcagctgagtaggcctaacatgtccacgggctctgtcttgatcttgagcagctcctgcgagtggctcttcttgacatgacgcgtcaggtggtccttacggccaaaccgctgggcacagtactggcacaggaagtccttacggcctgtgtgcaccactaggtgccgccgtacatccttacgagtatagaaccgccggtcgcagtggtcacaggggtgcttcttctccttggcaccgcctgctacccggcgtgagtgggccttcaggtgctctagcagggcctgggtactctcaaaggtctgcaggcacaccttgcagctgaggtcaccgctgctggcagcatgcatggccaggtggcgccggtagcccagcttcgtattgtaattcttaccgcactcagagcagtggagggcctctttgttaggatcatgggtctgcagatggttccgcagatggtccttgcggtgaaacatcttatcacagtacatacactggtggggtttctgggctgagtgggtggccatgtgcctgggggtagagacaggggataggggagaaagcagaaagaggggagatcacaagggatgactggacaaccaaaggtgtccattaacaggaaactagatataaaaaccatggtaaaggcttgcaatgcaataccaaaccagttatattctacagatatccttgcctatctgcaaaataatgtgtaccgacattctttgcagcattgcttgtagtagcaaaaaaaatcagaaacaatctgaacgtccaatctatcaatagggaactggttacataaattatgataagtccataaaatgactcaacttttcaaaaatgaggctttttgtgtacttacagggaacatgctcctaagagacaggaagtagaaaaaaagcaaggaggcagaatagtggatgtagactaggactctatgtgaaaaggggaaaaatatatgtatgtttgcttgtatatggctaaaatatttctggaaggacatacaagaaactgataccagtggctgcctatgcgaaaaagaaccgaacagcttatagatgggtgtcatggagaattttcatcgtataagttttggtactttttgaattttgaattacgtgaaagtatttcattttttaaacattacatttaaataattttaaatgatacaataaagagaaaataaaatatacctaaacgtgcagtctgggcacagtggtgcatgcctgtaatcacagcactatgggagggtgaggcaggaggatcatttgagcccaggagtttcagaccaacctgaacaacatagcgagaccttgtctctacaaaatcttaaccattagatgggcatggcagcatgcacctgtagtcctagctactcaagaggctaaggcaggattacttgagcccaggaatttgaagttgcagtgagctgtgatcgcaccactgcactccatcctgggtgacagagcaagactccgtctctaaataaataaataaacttccttatctagaacaaatttccaagatatacagggctaagtcaaaaaaggaagttcaatacagtacatgtgatacaatctgttttgaaaataaaaaagaaagagaatatacatgtttgaatgtcttaggaaggatacacaaaaaccaacccaccagctgcctttggggagaggaatagtgacttcgagtgtgaggatcattcattcttcactgcatgccagtatgtaccacttgaattgcttgtcatataaaccagtaacactttaagaaatgttttaatggtatggcacttcagtgtcccttggtttacctgatcctatatggttgaaaagtggctcagaatccaggaactgcaattcacagctccagagcatattcagaatcaactcagcacccactgtttgccaggctctgcataagctgtgtcattaaccttgatctccagacaaggaaaggagtctaaaaaaaaggcagccccctcaccctagcagaggctgaatttaaacaggccttcggaagacctatgttcagtcaggtatgcaacagctgtctctctctcgtacagcactctgtgatcctttctacctggagggtatcaaacacaccccctgcccacatcccacatatgcatgctcaagagtgctcgtgcctatgtgggttactgtcaacctcctgtgatggaactgacgtggtaatgtagagagggaggtgctgagtgatccacttttcatttccctcattttgcaggtgaggaaactgaggcccaaagaggtctagcaactcacctaagatcacacagtaaattatatgtgatgagtcagggctcctgcctcctgacccaggacctttcctgcagccgcccactggcaaccagatcatcattaagaaagtctaagaaggccgggtgcagtggctcatgccagtaatcccaatactttgggaggctaaggtggagggactgcttgaggccaggaatttgagatcaccctgcacaacacagggaagagatcctgtctctaggaaacatgcaaaaattagcgggtgtggtggtggtacatgcctgtgatcctagctactcaggaggctgaggcaggaggatcacttgagcccaggagtttgaggctgcagttagttataatcacgccactatactccagcttgggcaaaagtgagaccctgtctcaaaaaaaaaagaaaaaaaagaaagcctaagagtatggccttgactggagttcccttaacttataggagcacacagagaatctaagcactcctgaggaccacagaattgtcaagagggcaatcctgactaccatgctaccctgttgcctattttagtcccttcctattaactgttttccagatgaggaactgaggctttgtggtcatcttgttcatgtatttacttgtttactgtctgtacccactattaagaccataaacccaaggaggaccagcacccccatctgtctggctcactactccgccccttgcaccgagcactgtgcctggtacagagcaagagctcaataatgttggatagatgaatggatggttggatgactgtgcatcaggccaatctatctcatttctttttttttgagacggagtctcgctctgtcgcccaggctggagtgcagtggtgtgatctcggctcactgcaagctctgcctcctgggttcacaccattctcctgcctcagcctcccggtagctgggactacaggcgcctgccaccgcgcccagctaattttttttgtatttttagtagagacggggtttcaccgtggtctcgatctcctgacctcgtgatccgcctgccttggcctcccaaagtgctgggattacaggcgtgagccaccgcacccggctgatctatctcatttctaaagggcaagttcatggttcctctaatgcgaaaaggataaaatcaaaattgctcttttttgttttttttgagacagtcttgctctgtcacccaggctggagtacagtggcacaatctcagttcactgcaacctccttctcctgggttcaagtgattctcctgccacagagtcccaagtagctgggactacaggcatgtgccaccacacccagctaatttttaaaaaatttttagtagagatggggtttcaccatgttggccaggcttgcctcaaactcctggcctcaagtgatccgcccgcctcagcctcccaaagtgctgggattacaagtgcgagccaccacgcctggcccaaaattgcttttgaccatgcctccccatcctcaccaaagcaaccaaagctgctcttctctatctgccttatgtcagggcttttacgtttaatttcactttaagtaggggttcttgggcttacaagtttcagaaaagcagctgccccagtgggcaacagggagacagacatagttaaatgagtaagtagcaggctgattcagtagaagaggcactgcaggacctctgaagctgtgtgaccttgggtaagttatgtccctactctgaacctctactttaaaatttacagactgggccagaaggtctacttttccttctaaagttcgaatactgattcctaacttctagctaaaattctgaccatcacctgacaaaggtgaggaaagcaatatttaaaaaaaaatgttcagggctaagtgcggtggctcatgcctgtaatctcactgctttgggaagccaaggcaggaggatcacttgagcccaggagtttgaaaccagcctggggaacacagccacacccccatatctacaaaaaattaaaaacaaccaggtgcggtggttcaagcctgtaatcctagttacctgggagaatgagtcaagagaatcacttgagcccaggaattggaggctgcagtgagctgattgcaccactgtactctagcctggatgacagagcaagactcccatttcttaaaaaaacaaacaaacaaacaaacaaaactcaaggctgcctgacattggcacccagatcgtcactaagaaggtgtaagaaggccaggtgcagtggctcacgccagcaatcccaatactttggggaggcaacccatcagattctagtgtctgaatcaagcaatctgaatcattttttagtgagtgacttcaactgtttggcattcagggtatacttgtaggacaaattaacctccactcttctgccacagattaaaaacccacactaggcagagtctctctgctttttccctctgggaacctcagggcaggaagagatatgagagtgtcacctacctatacagcttgtatttggaagcaaaagccttgccacagtgcagctgagggcagctatatggtctctgctctggttgcgggaggctgtgaggcctcagcttctccccatttgagaaaggtgttcccgaaatttcacattggcacttcacttgactctccgcctcccggccccgaggcctgggaactagtttccagcccacttcctcctcctgctttgcatcttgaatccagggggggacgctggtgaaaaatgtggtcatggcaaggctaatggcaaagggccatgttattgagaaagcctccccatccgctccacacaggctctcagctctgtcacagcctccaacgcagctttcagaaaacaatctcttcacctgaaacatcagaacacctggtgttagggagcccaataccatgagaacatgggctctggaagcagacagatcccgttccaatcccagcccttccacttagaagctgtgtgactttcagccaattacttacttccctgagctgtttcctcatttataaaatgggcataataatctcctaaattataaaaatgttttgaggattaaatgagatcatgaatataaagcattcagcagaaggctgggcatccattaagtgcttagtggtagctactattactagtaccatctaggctaataagaaacaagataaactgaggaaccaaaagccccaaaacttcaaactttttcttctggacctcacttttatatcctttccattgaacctagagatagcggttcctccttcttattaccctggcacctcctcgtccactactttccacaattgtcctcctcatggaggtgctaaggagcaataaaatgcccaaaaggcaagagaggaggaaggggaagcctctacttaggaaatttacatcctagtcagtcctggtaccagatgtgtttcttagcagtgcatcaacatcaggagggtctatatgggaaggcaacagcagattcttagcattttccctaaaccaggactagaactggtcccatcctgaccaccaccacttctctgggtcactgtgtctcagggcccagaccatccctctttagcaaagcctgtccaacacccctaggtgctgagaggcccctcctacagggcctcagagtacatatgcacatctcctttagaagacggtagcgagctcgcattggaatttactcctctccaccagcctgattgtctgagggcttgcatcatctctctttcatctctatatacctaatatctagaaaaggaaccctaactttatttcagataggtaaactagtcactgaatgcaggttgattctcagggaccaacctaggcccaggtagttctggtttaaactgggttcgcagccattcccaagtggggagccgaaatcttaaagtctgattctttctcttgttgaatagaaggggagatgtgcaagaacgacacaactccattccagatactaatccagaggaagaggatgggagttaccacactgactctcaaaaggggacaagagacccacattcatactcccaagcttaccacagattaccaaccacgatgcaacctgctacaacagggggattccctttgaagagatggtgccaaaatttgatcatgaggcttttccatgtgaagagagaaaagggggtgtctggggattatccacgagaatctggggagggctccaactgcacaaactagctgtgggccacagaatgcttgctcagctcattagcacctgctgcttacagtgaccattcatccaacagactggccgtgaacaagatgatgggatcagcgggttcatgccccagagagctttgctcatcattaacatgagctacgtcctgttcaggaaccattcctcttgttgaagaaacactgcgatgtaatatgataaacacgtccccatcacgagtgtagatttgtctagaaagatctgcattaaggtggctgcattttgcatgaatcacatgctggggaggggtaggtagcactaaaaactagtcccacttgagccttcaagtcattatggcatatgtgcctgcttcactataaacctcaaaggcctgtgacgtctggctttcattgtttaagtcccctcctcctttgcaagggtggaattacctgtttgtaataccagcaattactatgcaccttggaattgagcagagagtgtgctcgagtgtgcatgtttagattggagggaattacccctaccttcaaagtcaaattctactcccccttcaatttgaaatcatgcacctcagcctctggaaagttgggaatggcagccagaaggaaacaagtcacatcaatttggctgatgtgagagaggagcctagccctggaaactccacacaaactcagaaagagaacattacgtccccacctcccacacgtccacctcatctgttctcctgaacaagcacaaacaagacacaatagtttagtaggctgctactgaaagagtgagtaatgggcttctaggaaagaggctggtggtggctaaggagcttgtactgatagaaccaaaggaggaaagcagcagccatgtgctcaccttgatctgcttttaatggggctatgtcttcacaaagaaaagagccaacaccctgatcctactctcctacacttttcaaaaggcacaggaagtccctacctacagtcaccagcagcctcttggataaccaaagctgctagtgttacctaggaacccttttggggatctagtctctctctgccctttgtctgaaaactcctctgatccagaaagattcctgggtttgtcttacataagcagaaggcctgttccttcagacttgtccttcctcagcaaaactgtgaaagaattctacttctctttcaaagctgctcttctggtctcacattttaatcttaacaactatagactatagagaagctgacagaacctgtttccataaaacaaacacaatccttcccagttactggcacaactcagtatattttcagcctaagattctttctagtgcctgatctgaaaggggaaagaaccttggacttgctatcagaagagctgccacttactggctgggaaaccataggcaggttactttatttctctgaacctcagtttcctcaatttctaaaatacggatttattttccttacctgtaagattcgtatagaggattaaatgaaataatactcttgaaagtggctgatacaaaatgtgtgctctgaatacatgcagtgccttctctgaggtctcggctgtgtctgcctctttttccgcatgaggcctgaatagtacttctttttttcctctttaatgttacttctcaggcctcagagtgagtttccttcctttcccaacatctcccccagaatgcagtcttccccttttccctcacaactaaccctcggcacatcccctttaaagagccccttactttacctccctccaggcaccatctcctgggccagagttctctcttaagcagagagccactttcctatactctcttgtattattagggctccatatcccaaacaggaatgcttgctaaaaactctgtatggtcctctttgaaagctgaaactgagacatatttctccccagtctgtccgtcccctgttatgggccatgatgcctgctgctctctgatgaaactatagtttttatggtgttacatcatctctatagaaactgcgttctttctccattattagcctgtttcctcatctgtaaagctaaaaatacttacctcacaggcttgctgtaaggattattttagtgaggtatgcaaagggctcagcacagagcttggcctgctagaagtacccaacaaaagagagctattatctttgtctttgtattgagttgcatgtttccaccttctgctgccacactcaaattctcctcactcccccctaaaaaacagttgagagataacacccctgcacaaggaaagggttaatctttgagtgttcttaactaaagagacccacagaggattaacagctccacttcagtgactaccctaaaatagcttttatcctcctgcccaagagttacttggggatctgaagaactcaattcaacacctgccggaggaaatagacccagaacgttccttgggatagaatcttcccttaagcagaacccaaaatagcaactgggaaattataaatagacttagaggaaagaaaaaacaaaacaaaacaaaacaaaaaacagatcctgatctcagaaccagaaacaaatcctaaaacacactggttggctggaaaacagtgagaagaggggaaatgggaatgctgtcgcccccttcccccccgcccactccagagtggtgggagaattaaattacagggaggctggagagtctcaatgacttgcaccattccaagaaacatcaaacaggattaacaggggttggatttactctcaggctgctaattcttctgtcagtgtagatgggccctctttggagtctctttgattcactatttcctcagattcctgctgcctcccactcctggggaggccttgaacaaatggctgcaactcatcacaaccccattttcatggggagaaaacgtgattcgacacccccgctcccaatctggtggcctcaccttaggagagaaaggttagaaacccaagaccagactctacacacagtcccatggctgacaggtggaaaaacacacaagccaggagacaggctaagcttgcaggtgaaagcaccgattcccccacacaggtgtccccatatcctccacctaacaggcccctttctccccaccaaggtgggccacagcctggtcccaggccaacttttagatcaccccactgtggtgtgggaaaggttcaattccccgagcctgggagagatgggagtggatgagggctggagaagcaaaggaaatccagggagaagtctggagggagtctctgggatgggaaggaagagcgaggatgggaaggaatcatgagcaactttcctgggtctctaagggatccccacaagaatgaaatgggggattataagggctggaaggctggggggatggggatagtcagaagtgtatcctctgaatttcaagagggtctcaaaatgggtaacgggatggaagatgtcgaaagcctgggagtatggccactgaggagggaactacaggtggggcttattcgacttctccagacccagatatttgagggaagcctcaaagggagttatgtaagtctggaaaatgaaacagggtacagagcgggctatctggagcaggaaagggggttatgtgggtctgggtaggcgtgtcggagggagggagcaggtgcagcttatctgcgtcccccagacccgggtccctggtaaggtcagcagcgccttatctgggtctccagggagcctaggggtcgggaatgggggaccctcaggactgcgtctccaggtctcggaagggaggggaccggtggcttcctcgggtcccccagacacaggtatggggtccagggagagttttcgtcaccccagggcctatctggggccgggttggcgcagaccgggccccgggtcgggggtgtgggcgaccgcgctgaggggcccgagatgaggcgcgccgccgctccgggtacagggcgcgcggacgcagcgagacggcctcccgcccctctccccgccgtcccctggggccctcgccggcactcaccgcgctcggggccccacgctgcgggccgggccgcgctcgggctccgccaggccccctcaggccccggtagtggcggcggtcgggccattgtgcggtgcattgtgggagccgcgcgagcgggcgctcgggtcgtggagggggcggtgccgcgggatctctatggtcccgcccgcccgcgggctagagcggccggggcggtgcgcgggcggcgcgcagggaccgctgggagcggggcgggcgctcgcgtccctccttccctccccgactgtgcgccgcggctggctcgggttcccgggccgacatgggcgccgccgcgtgggcacggccgctgagcgtgtctttcctgctgctgcttctgccgctcccggggatgcctgcgggctcctgggacccggccggttacctgctctactgcccctgcatgggtaaggcctcccaagccctctgctcagatggagaaactgaggccgggagaggaaaagccactcctcagatgcgcccagagacaccttcacaggtccaggagagaacctcagagcgggacggggcatgctcttctcctctctgccttagttgcaagggcacagaggggccaacgtgtccaactttccatttgacagatgagaaaactgaggctgggagaggttacgtgacttgcttgaggtctaagccagtccagggtccagtaaatggagttagtggggcaggacttgatgtcactgacccacgctggctcctggtgatttttcattgattcagcaaatatttatggggcacctattctgtgccgggccctgttctctgtactgggaataccgcagtgaataagataaactccgtgtccttgtagagccttcattttagttggggaagacaaacaattgagaataagtaggccaggcgcggtggctcacttctgtaatcccaccactttgagagaccgaggcaggatcacttgaagccaggagctcgagatcagcctaggcaacatagtgaaaatccaatctcaaaaaaaaaaaaaaaaaaaaaaagcagagcgtggtatcgtgtgcttgtagtcccttgggagttatctgggcggctacttgggaggctgaggtgggaggatctcttgagccgaggaattcgaggctgcagtgagctctgatcgtgccaccgcactgccagcctgggtgacagagtgagaccctgtctcgaaacaagcaaacccaaaaaggggtaaacataaaacaataaatacatagtttcatagaggatgatgaatactaagggaaaataaagagagcagggtaggggagaatctaaagaccatgccaggtgcacagttgaaatgggtatggtggatcatcattgtggaagtggatgatcttaaggcccccagtggcttccagactcctgaccatgactttcagggccctgaatgatgtggcctccactggccatctccacaactcccttctctgctgatcctccagctgcagccacacttaactcctttgcgttcctcacacatgctcaggtcttccagtctgcactgctgcaggtggcggtccctatgcctggaatcctctcctccatttctgcctgaccagctgtttcccatcctttagatctcagcctaaatgtcaccagaaaggatttcactgacctctacccaagtaatctcctcattaccctatcaccaaacttttttcatctctttctggcaattatcaacatttttcatgtatttgtttacatgtttagtgtctctgcagtgaactgtgagtgccttaggggcagaggccttgtccttcttgttcattcctgtatcccagcacctagcacagagtctggcacattgtggcctctcaatcatatttgtgaaatgaatgaacaggtgccatgctgggattaagaaaaggaatcacacagggtccttgcttctgaggcattcacaggctgaggaatcagccagtacgaaggccaggaagtgagcaaagatacttgaggaaaattgaagaactgaagtagctcagagccaaggtgggaggtaaaggagggagagtgagtatggcaggggattggtgaaaggagcccagtgaatgaggcattcgagttgcccgtccatgtgcaggtgaatggagatagaggtagaagctcttctggctgagggacagcaagatcagaggcattgggtggggatgggaattgtagagcatgttggggaaacagcaagaaacctggagtggcggaagcagttgttgcaggacctgaagagccttggatatcagacccaagagtccagacttgttcttatgctgccagctcccctagttctccttggtatccctgactttctacccctggctccacaacctttctgagccctgcatgctctatgccctccatgccccaggcctcacctcacccgcaatgtaccatttccagggcgctttgggaaccaggccgatcacttcttgggctctctggcatttgcaaagctgctaaaccgtaccttggctgtccctccttggattgagtaccagcatcacaagcctcctttcaccaacgtgagtacttcccactgaccttggcctttctccgccctttctcagtcttgcttacttacacttaaccctcaagtcctctgggctttacctcccactcctctgagatttccctacctccagccagaactgtcttcactgcaataacaatgcctaacatttatttatccagcacctgttgtgtgcggctgcatgagaattagctcatttcaccctcatcacttgcctgtgaggaaaccggggtttacagaggttaggtaacttgcccaagatcacacagcctgtgagtaggagagctggaattcaaagctatctttgtctgactccagagcctgtgacttgaacctaaagcctccatttccttccctgattggtcctaccctctgtgcattccattggccaagggtggcagatgctattatcaattttaaaggagacatgcaggcacaggttatttaatgacatgtccaaggccacaacccaggtagtctggcttcagtgctgcctctcaccccatcaaggggctcccttgtcatgcgatgctcaccggcccccagttccttgcttattctttgtgtcttccagtgaccttgtgtcgttgttcatattgtatctcccggagcctggcagtaggaacttaattagtatttgatgaattgacttaataattttccaatagacatcagaaataatacttagtgtgaacaaaacacttaatttcattcttacaaccttttctctgcatagattttactttttcctttgcatgccagtatttacagaggttttgagcagcagtcaaaagccagagtaccagagatcatagtctgacttgggttcttactagttgcatggcctggacagggtactttacctctttgtgcctcagtgtcctcattttaaaaataagctggtaatgattcttgttaccctcttgtggtaaggactgaatgtgtcagtggcagtaacacgccttcagtgttgtcatatgccgcctccctcttagaatcaactgagcttatcaacgtacagatcctagagtcctcagttaatggaaaccattgatgttctgataatttcgcactcactatttttttttttttgagatggagtcttgctctcttgccaggctggagtgcagtggcacgatctcagctcactgcaacttctgcctcccgggttcaagcgattctcctgcctcagcctcctgattaactgggactacaggcgcaccaccacgcccagctaatttttgtatttttagtagagacagggtttcaccatgttggccaggatggtgtcaatctcttgacctcatgatgtgcctgccttggcctcccaaagtgctgggattataggcataagccactgcgcctggcctcgcactcactattacagtgtagacattgcccatccatctccctctggcttgcttgcctctgtctccttgccttctcagccagttgtctttccaagtccccacttccttgctttctgtggcttactaacctgctccaacaaggctcttcttcgccactgttagcattctcactgaggtcaccagtgacctccaaattggcaggggttatttcccagtctttctctcacctgacctcccactggcacttgaccctgcaagcttctccttcctgaacttccctgttccaagacaccacctgtccctgctacaatctaacctctcagcattttcctctttccactgtatcaggggctcctttctctccacccactgtttagatgttagtgtttctcctctttctgtttgcttactagctatgtgacctcagatgttatctagattctgtatgcttgggtttcttcataagtaacctggagatggttatattcctacctcaggattaaatgtgcaaatctatgtaaagtgatgagtgcagtacctagcactgtgtcaacatgcaataaatattagttgctattattaccattacttgctttgctataaatatctgttgactcctgtggcttttactcttctccgtgtacctcccaaatttatctgtggcccagactcagactcctccataattacaggcctgtgtttcttttttctttttttttttgagacgaggtctcactgttgcccagggtgaagtgcagtggcatgatcatcgctcactgcagcctccatctcctcaagcagtccttccacctcagcctccaagtagctgggattacaggcacccaccatcacacccggctaattctttgatttttagtagggacaaggtctcgctatgtttcccaggctggtctcaaactcctgagtctaagcagtcctcctgcctcagcctccaaaagtgctaggattacagacatgagccaccacaccctgtagaaatttttttggttttgtttgtttttcatttttgatgaagagtctcgctctgtcacctaggctgaagtgcagtggcagaatcttggctcactgcaccctctgcctcccgggttcaagtgatttttgtgcctctactcttgagtagctgggactacaggcatgtgccaccacacccagctaattttttgtatttttagtaaagacgaggtttcgccatgttggccaggttggtctcgaactccctgcctcaagtattctacctgccttggccttgcaaagttttaggattacaggcaaaagccactgcgcccagccagaattttttttttttttccaagacggagttttgctcttgtcacccgggctggagtgcagtggcacgatcttggctcaccacaacctccacctcctgggttaaagcgattctactgcctcagatctcccaagtagctgggattacaggtgcccaccaccatgcctagctaatttttgtatttttagtagagatggggtttcaccatgttgtccagagtggtctccaactcctgacctcaggtgatccatccgcctcagcctcccaaagtactgggattataggtgaaagtgaccgcacccagccagaaattttttaaaatctagaaaaatatgccaggcgcagtgggaggcgggcaaatcacttgaggtcagaagttcaagaccagcctggccaacatggtgaaaccccatctctgctaaaaaagttagctgggcgtcgtggcgcccgcctgtaatcccagctattcaggaggctgaggcagaagaatcgcttgaacccgggaggcgaagtttgcagtgagccgagatcgcgccactgcactccaacctgggagacagagcaagactccatctcaaaaaaaaaaaaaaagtagaaaaatataaagatgaggctgggcgcagtggctcacgcctgtaatcccagcactttgggagaccgaggtggacagatcacgaggtcaggagtttgagaccagcctggccaaaatggtgaaaccccatctctactatagatacaaaaaattagccggcgtggtggtgcgtgcctgcaatcccagctactcgggaggctgaggcaggagaatcgcttgaacctgggagggggaggttgcagtgagctgagatcacgccattgcactccagcctgggtgacagggtgagactccatctcaaaaaaaaagaaaattacacagatgaatacaaccaccaaccatatacccaccattagaagtgataattgttaacactttctcatgtttgtttcatcttctctttttgttaataaaagaaataaagcgttacagataaagttggtaaaagatgaagtctctttttggcccctggggctaaccctgttcccttaacaactgttgtggatatagtgtatttggtgtgactcctttgatgttccttcctatactttcattgtggcactgagcatcctggtactgatctccaggtccaaagtgcaagaacttctgtacttctctagagcaaatagttagaagaggaaggtacattaaaaaaaaaaaattttttttttgagacagagtctcactctgtggcccaggctagagtacagtggcacagtcacacatcactgaagcctcaccctcctgaatgcaagaaatccttccatctcagcctccctagtagctgggactacagatgtgcaccaccacgcccagctaatttttttattttttgtagagacagggtctcgctatgttgtctaggctggtcttgaactcctggcctcaagtgatccttctacctcggcctcccaaagtgctgagattacagacatgagctaccacacctggccagaaggagcattttaaattctattagatactcaccgattggatcccaaactggttgctccaaaatgtagacttctgctaccggccgtgtagaagagtgcgcatttccccacaagttaagcttttcagtttttgctagtctcatgagtgagaagtaattgatgcctcgttataattgtaatttgctttttcctaattactaatgaggttagacatcttctgagtgtgttggctatttgggtttcctttgctgtgaattgtttacccctaacctttgcctgtgttttatcttggcattatttgtctttttttgttacagatcagcaggtgttttttaacacaagggatgttactgtttgttctttagtttgcagactctcctgctagcctgtctatcctagctttggcgtcttttgatgaaaacttttaattgtcatgtagtctgaactgtcttggtcttggagtgtttttgtttttttgagacggagtcttgctctgtcgtccaagctggagtccagtggcacaatcttggctcactgcaagcaacctccacctcctgggttcaagcagttctcctacctcagtctccccagtagctgggactacaggtgctcgctaccacccccagctaattttcttgtattttagtaaagacagggtttcaccatgttggccaggctggtctcgaactcctgacctcaagtgatccgcccgccttatcctcccaaagtgctgggattacaggcgtgagccactgcacctggcctggagtgtattgttttaataaatgtctaaagtagccacgggggcactgagacgggacctctgctcctccttttcctgtagctccatgtgtcctaccagaagtacttcaagctggagcccctccaggcttaccatcgggtcatcagcttggaggatttcatggagaagctggcacccacccactggccccctgagaagcgggtggcatactgctttgaggtggcagcccagcgaagcccagataagaagacgtgccccatgaaggtgggtcctgtgggttcgggggccctttcttcctgttccatgtcctctaggcccccaagactatgtcatggcaaaatgtggggaaaagcaccagaaggacttagaatagaaagatggagatttaagtcctgtttctggcatttgttagcgaagctgcatcaccttgggcagaagactttgcttctctgaaccttcatttctacctacaaaatagagatgccagtccctgctctgtctcactcctaaagtgtcatgagggccaggtgaaaaagtgcttgtaaactgcaaagtgccacatcagtaataataactaatattcatgtagcacttactatgtatgtcaggtaccacgctaagagctttacatgtatcaactcatttaatactcacactgttccatgaggaaaatacttataatatccccacttcatagagaggacaccgaggatggcacagagagggtcagtgtcttacccaggatcacacagcaaacaagtggtagagctgggattcaaccttaggtaatttggcaccattgtctacccacttaacttgaataccttcctgcatctcagcaggtaaatgagaggctgtcatatcttattaaaagaaatttatacatttctggcactttggaaataaacccccaagtatgtctttcggtgtatgtgctaaagtcttgggaaagtggttggaagaactatgaaatttgagaaaggagacctagctcacagccccaacagtgcccttactggctgtgtaaccttgggtaagtgtctgaccctcagtgggccttggtttccaccttgaaaatgaaggcattggattagccaatcttgaatgtctcttgaagctctagtccttggttcaaaatccaaggtctgcttctccccagaccctcatcagtgctgctgggtcagcaggatgtgacatgtgaacaggaaagactctcctgctggaatccagaattgaagccacggcactctgctcagcccctggcctaggaattgcagagtgacatttctcctaggccatcctgtgagagtgttttggcctgagtcacatcacccagcttcccccacctacacttccctggccccatccccaaatggctttccctccccatcagtaagccttccaccactctctttctgcaggaaggaaacccctttggcccattctgggatcagtttcatgtgagtttcaacaagtcggagctttttacaggcatttccttcagtgcttcctacagagaacaatggagccagaggtacttggagggggtagcgtttctgggtttaggggaggcgcatggagctcatgagcattcagcaccttctggcactctccccatcttcccaactctgatgtatgagaccaaaggtgcaggtgctctgtctgttgaacttggaatcctgtgtgatctgttcccatgtccacgcctgacacggtggaacattgacccgccatgagattgagaaagagttcatcggttgataagggatgtcataaaaagaacattctgcagtcgcatgagtctcaatttcctcctctaggcgtgagaatcactcctgtgttaccttactcttcccaaggtgaaactggaagcagcttctagagaacagcttcaggtgcagaccgagaaatgacgtcatcctgataattattggacgtgtttattaattgcaccccattagcccctgtttttaaaaaatataggttagcaggacgtgggcacaggccgtgaaacatttatagggcgcctgtcacgtgtgagacatagtaatcagaggccaatggtgatgtgtgaaaatgaggatgaccagctctggttttctaggagctatggtctcataatgacaataatcagcatagtgtacttgtccttaatgttatagcatggcaggaaagaccatgggcttagaaggcagacattggttaggaggtgcagggaacatactaattcatgtgcggtcaaagcacttggcatttaatagggcaaaggtaaacagatgtagagaaatgagtctcatgcctgtaatcccagcactttgggaggccaaggtgggtggatcacttgagcctaagagatcaaggctgcagtgagccatgatggtacccctgcactccagcccaggttacagagcaagggcctgtctcagcaaaacaaaacaagcacaggccaaggagtgagatagccagcgctgatggtatctgcctcgtagtgcatgaagtgcatgtcatacactaagcagccagccagtgttggctgtcagtgttattactcacatgctttattttatttaagactttgagatagttcatgaagtgggtattattatcaatttccattttataggtgaggaaactgagcccagtgaagttaaataacttcccaaggtcattgagctgttgagtggacagctcaggtctgtttgtaaatctttaataaataacaacagctaagattcatttagtgtcttctatgtgccagacactgttctaagtcttcacaggtattgactcacttaatctttccctgagtctgtgggttgttactgccatctgtgctttacacttagagaaattgaagcagaaaggaataaggtcccttgcccaaggtcataaagcttgaagttgcagagcttggttttgaacccagaagtctgaatccaaagcaccagttactttatatatttatatttgaaatgggtcttgcttgtctcccaggctggagtacagtagcatgatcataactcactataacctcaaatccctgggctcaagcaatcctccccgctccgcctcccaagcagctgggagtgcaggcatgtgccaccatgcctgacgaatattttgttttgttttgtacaaacagggtcttgctatgttgcccaggctggtcttaaactcctggcctcaagtgatcctcccacctcagcctcccaaagtgctgggattacaagcatgagctgctgcgcccagtcccaaagcacctgttcttaatcacagtggattaaatagctgtgcctttaacagctgccagttcccttctgggacttgcctttggacctagctttggacctagttcatgtgccactgaggatcctcagtcatggcagatttaaatcttcctcattgttgatcccagatagcacactcccattctctgcctgcatggttctcccccattcacctccgaatgacctggagctattgccagaaggcagacctgccctcaaaggatggagatttgcccatattgacaatatgccaggaaaaaaagaaagaaaaaaaagccaccaactctaaaagcaactccaaaagcaaattccaaaaagctagaaaaagcacacaatcctagtaggaagagaaaggacaatggtgcatggggagtgttgttgaaacacttgtttattgccccatagctttgtttgagttcattgagttgtaagaattacatgagggtttgaagaagtttgtgccttacagccaagtttttgggaaaggaaaattagtagggaagatgaggtccctagagggagtttgagggagttgatggtcccttggcagctgcctgtcttccttcaacacatatttaagaagcacttcctgagtgtcaagggctggtttggatgctggggatataggccagaataaggacatgaacaaggcagggaatgaacaaggccagaataaggcagataaggtccctgccccaatggaactcatagtctaacaggggagatagtgaataaacttttacataggatagttccagagtgagatggtgcttagaaggatataaacaggtggtatgtgattggcagggctaagaccagaaggatgagaaggagccagttgtgtcagagttagaggaaaagtagttcacagcaggaagtcaggagcaaagaccctgaggcaggaataagcttggtatggtgaaggagcagaaagaaggcaatgtggtatggagtgagtgagagaatggtaggatgttgctcttatctgttgctgcataataaatcactacaaaacgtagtagcataacaacaagtttttttttttttttttttgagacggaatctcactctgtcaccaaggctggagtctcggctcactgccagctccacctcccgggttcatgccattctcctgcctcagcctcccaagtagctgggactacaggcgcccgccaccacgcccggctgatttttttgtatttttagtagagacggggtttcaccgtgttagccaggatggtctcgatctcttgcccttgtgatccacccgcctcggcctcccaaagtgctgggattacaggcgtgagccaccgcgcccggccaacaacaagttattattatttctcatgggactgtgggttaactgggcttagctgggcaattcttttgggttttcatttttccgttttcttatggaatccctgctgtacaaagtttaaattcaggttaaacatcttatttcttggaacgaataacctttattcttgcaatgaatagcctcagtaaatgcttttctactttctgtctttgaatttctctagctatctcataggtacttaggtatctcatagaagtggaatcatgcaatatttatctttttgtgtctggcttatttcatgtggcatatttcatgtggcaagattcatcagtgttgtagcctgtatcaaaattttagtccttttaaggctgaataatagttcatcgtatgtatataccacatttgtgtatctcttcatctattgatggacacttgagttagctgggcagttattgcttgtggtctcatgtggctgcagtcagctgtcagctagggctcaagttatccttttttggtagagatgggtggggatcatgctctgttgctcaggttggtcttgatctcttggcctcaagtaattatcctgccttggcctcccaaagtgctgggattacatcatgagccaccatgcccatccagggctcaagttatctaaaggcttgaccaaggctgcgtgcaatggcttacacctgtaatcccagcactttgggaggctgaggcgggtggatcacttgagcccaggaattcaagaccagcctggccaacatgccaaaaccccatctctactaaaaatataaaaaattagctgggcgtggtggcacacacctgtaatcccagctactcaggaggctgaggcataagaatcacttgaacctaggaggctgaggttgcagtgagccgagattgtgccactgcatcccagcctgggcagcagagtgaaactgtctcaaaaaaaaaaaaaaggcttgactgagctacatatccaggaagtccccctcatgtctggtgggtgatgctgctgtcatctgggagccaagctggggccaccaagaagcatgtatacacttgacctctccatgtggcttgggcttcttacagcatggcacctgtgttctgagagggagcatccagggagtgagtgtcccaagagacaggaaatagaaactgcgggctccctaacaactgaatctggaaaccggcacagtgtcacttctgtcgggtgctattgggaggaggcagagcccacctaatgggaaggggttcaaagacttgaccacttctaatctgccacacgggaaaagagatcagagaggtgggcaggggtcaaaacacgcgggtttataggccctgtgaggcaatctgttaagaagcctgtgaatgattagtagggatgaatttgaatgtgtatgaacatttaacattaaacatttcttaagatacaggatacttccttgctatgcatatttgtccttggggagaagagaagaatggaatcagagagtgaagctcttcccagccttactgtgcgattaggcagctgctccccttctctggcctcaatgtcccatctataaaatgaaggggatgggcacgatgagtggttttgaaactatcttcagagttttcaagaagtgcttgtcaggcatagtggctcacacctgtaatcctaagggattacagagaggttgaggcaggtgatcgcttgagcccaggagttcaagaccagcctgggcaacgtagggagaccccatctctacaaaaaatagaaaaaattagccaggcatggtggcgcatacctgtagttccagttacttgggaggctgaggtgggaggatcaggtgagcctgaggaagtcatggctgcagtgaacccatgatctgtccactgcactacagcctgggcaacagattgagaccatcttaaaaaaaaaaaatgcctctagggcctttatggggggtagcagtaggggaccaagttccaggggctcaattcttcctccctattgccttcaaccaataacccttaaatatatcagggttctcagtaaggcagaagaagtttgtaggctacaagtctaggtgtgtcagacttaagttaggctacaggtagcaggaagcccgaaataagagcagattgatagggtttattgttttcttaagtaaaagaagatctgggtatgcagtccagagctgaatgccagctccatagtgtcatcaagaatccagctgggtagagtggctcacacctgtaatcccagcactttgggaggcagaggcaggcggatcacttgagg
